(19) United States
(12) Patent Application Publication
(10) Pub. No.: US 2024/0271143 A1
(43) Pub. Date: Aug. 15, 2024

(54) POLYNUCLEIC ACID MOLECULES TARGETING PCSK9 AND USES THEREOF

(71) Applicant: Sirius Therapeutics, Inc., San Diego, CA (US)

(72) Inventor: Curt BRADSHAW, San Diego, CA (US)

(21) Appl. No.: 18/614,396

(22) Filed: Mar. 22, 2024

Related U.S. Application Data
(63) Continuation of application No. PCT/US2022/044444, filed on Sep. 22, 2022.
(60) Provisional application No. 63/337,958, filed on May 3, 2022.
(60) Provisional application No. 63/247,677, filed on Sep. 23, 2021.

(51) Int. Cl. C12N 15/113

(52) U.S. Cl. CPC C12N 15/1137; C12N 2310/14; C12N 2310/315; C12N 2310/321; C12N 2310/322; C12N 2310/351

(57) ABSTRACT

Disclosed herein are siRNA duplexes, pharmaceutical compositions, and methods for suppressing the expression of proprotein convertase subtilisin/kexin type 9 serine protease (PCSK9).

### CROSS-REFERENCE TO RELATED APPLICATIONS

[0001] This application is a continuation of International Application No. PCT/US2022/044444, which was internationally filed on Sep. 22, 2022, which claims the benefit of U.S. Provisional Application No. 63/247,677 filed on Sep. 23, 2021, and U.S. Provisional Application No. 63/337,958 filed on May 3, 2022, all of which are incorporated herein by reference in their entireties.

### SEQUENCE LISTING

[0002] The instant application contains a Sequence Listing which has been submitted electronically in XML format and is hereby incorporated by reference in its entirety. Said XML copy, created on Mar. 21, 2024, is named 61382-708-301-SL.xml and is 3,207,920 bytes in size.

### BACKGROUND OF THE DISCLOSURE

[0003] The discovery of RNA interference (RNAi) as a cellular mechanism that selectively degrades mRNAs allows for both the targeted manipulation of cellular phenotypes in cell culture and the potential for development of directed therapeutics (Behlike, 2006, Mol, Ther. 13, 644-670; Xie et al., 2006, Drug Discov. Today I1, 67-73). As another RNA therapeutics, antisense oligonucleotides (ASOs) is involved in RNA processing and modulates protein expression (Rinaldi & Wood, 2018, Nature Reviews Neurology volume 14, 9-21).

[0004] Proprotein convertase subtilisin/kexin type 9 serine protease (PCSK9) gene is the ninth member of the mammalian family of serine proteinases. PCSK9 plays an important role in the metabolism of low-density lipoproteins (LDL), development and progression of the neurological diseases including neuroinflammation, Alzheimer's Disease, alcohol use disorder (AUD), stroke, etc. Accordingly, there is a need for developing an effective PCSK9 inhibitor without cytotoxicity. The polynucleic acid molecules, conjugates thereof, and methods described herein satisfy this need and provide related advantages.

### INCORPORATION BY REFERENCE

[0005] All publications, patents, and patent applications mentioned in this specification are herein incorporated by reference to the same extent as if each individual publication, patent, or patent application was specifically and individually indicated to be incorporated by reference.

### SUMMARY OF THE DISCLOSURE

[0006] Disclosed herein, in certain aspects, are polynucleic acid molecules for modulating expression of PCSK9 gene, wherein the polynucleic acid molecule comprises a nucleic acid sequence in Table 1, Table 2, and Table 3.

[0007] In some aspects, the polynucleic acid molecule is a single-stranded nucleic acid molecule. In some instances, the single-stranded nucleic acid molecule comprises at least 14, 15, 16, 17, 18 consecutive nucleotides that are complementary to a sequence selected from SEQ ID NOs: 1, 3, 5, 7, 9, 25-127, and 437-539, with no more than 1, 2, 3, 4 mismatches. In other instances, the single-stranded nucleic acid molecule comprises a sequence that is at least 80%, at least 85%, at least 90%, at least 95% complementary to a sequence selected from SEQ ID NOs: 1, 3, 5, 7, 9, 25-127, and 437-539. In some instances, the single-stranded nucleic acid molecule comprises at least 14, 15, 16, 17, 18 consecutive nucleotides that are complementary to a sequence selected from SEQ ID NOs: 1, 3, 5, 7, and 9, with no more than 1, 2, 3, 4 mismatches. In other instances, the single-stranded nucleic acid molecule comprises a sequence that is at least 80%, at least 85%, at least 90%, at least 95% complementary to a sequence selected from SEQ ID NOs: 1, 3, 5, 7, and 9.

[0008] In some aspects, the polynucleic acid molecule is a double-stranded nucleic acid molecule comprising a sense strand and an antisense strand. In some instances, the sense strand comprises at least 80%, at least 85%, at least 90%, at least 95% identical to a sequence selected from SEQ ID NOs: 1, 3, 5, 7, 9, 25-127, and 437-539. In some instances, the antisense strand comprises at least 80%, at least 85%, at least 90%, at least 95% identical to a sequence selected from SEQ ID NOs: 2, 4, 6, 8, 10, and 231-333. In some instances, the sense strand comprises a nucleic acid sequence comprising at least 14, 15, 16, 17, 18, 19, or 20 consecutive nucleotides of a sequence selected from SEQ ID NOs: 1, 3, 5, 7, 9, 25-127, and 437-539 with no more than 1, 2, 3, or 4 mismatches. In other instances, the antisense strand comprises a nucleic acid sequence comprising at least 14, 15, 16, 17, 18, 19, or 20 consecutive nucleotides of a sequence selected from SEQ ID NOs: 2, 4, 6, 8, 10, and 231-333 with no more than 1, 2, 3, or 4 mismatches. In some instances, the sense strand comprises one of SEQ ID NOs: 1, 3, 5, 7, 9, 25-127, and 437-539 and the antisense strand comprises one of SEQ ID NOs: 2, 4, 6, 8, 10, and 231-333. In some instances, the sense strand comprises at least 80%, at least 85%, at least 90%, at least 95% identical to a sequence selected from SEQ ID NOs: 1, 3, 5, 7, and 9. In some instances, the antisense strand comprises at least 80%, at least 85%, at least 90%, at least 95% identical to a sequence selected from SEQ ID NOs: 2, 4, 6, 8, and 10. In some instances, the sense strand comprises a nucleic acid sequence comprising at least 14, 15, 16, 17, 18, 19, or 20 consecutive nucleotides of a sequence selected from SEQ ID NOs: 1, 3, 5, 7, and 9 with no more than 1, 2, 3, or 4 mismatches. In other instances, the antisense strand comprises a nucleic acid sequence comprising at least 14, 15, 16, 17, 18, 19, or 20 consecutive nucleotides of a sequence selected from SEQ ID NOs: 2, 4, 6, 8, and 10 with no more than 1, 2, 3, or 4 mismatches. In some instances, the sense strand comprises one of SEQ ID NOs: 1, 3, 5, 7, 9, 25-127, and 437-539 and the antisense strand comprises one of SEQ ID NOs: 2, 4, 6, 8, and 10.

[0009] In some instances, the sense strand comprises at least 90%, at least 95% identical to a sequence selected from SEQ ID NOs: 1, 3, 5, 7, and 9. In some instances, the antisense strand comprises at least 90%, at least 95% identical to a sequence selected from SEQ ID NOs: 2, 4, 6, 8, and 10. In other instances, the sense strand comprises a nucleic acid sequence comprising at least 14, 15, 16, 17, 18, 19, or 20 consecutive nucleotides of a sequence selected from SEQ ID NOs: 1, 3, 5, 7, 9 with no more than 1, 2, 3, or 4 mismatches. In other instances, the antisense strand comprises a nucleic acid sequence comprising at least 14, 15, 16, 17, 18, 19, or 20 consecutive nucleotides of a sequence selected from SEQ ID NOs: 2, 4, 6, 8, and 10 with no more than 1, 2, 3, or 4 mismatches. In other instances, the sense strand comprises one of SEQ ID NOs: 1, 3, 5, 7, and 9 and the antisense strand comprises one of 2, 4, 6, 8, and 10.

[0010] In some aspects, the polynucleic acid molecule comprises (1) a 2′-fluoro modified nucleotides; (2) a 2′-O-methyl modified nucleotides; or (3) a modified internucleotide linkage. In some instances, the polynucleic acid molecule comprises at least two consecutive modified internucleotide linkages at the 5′ end. In some instances, the polynucleic acid molecule comprises at least two internucleotide linkages among three internucleotide linkages at the 3′end substituted with modified internucleotide linkages.

[0011] In some instances, the sense strand comprises ‘5-NfsnsNfnNfnNfnNfNfNfnNfnNfnNfnNfnNf-3’, wherein the antisense strand comprises ‘5-nsNfsnNfnNfnNfnNfnnnNfnNfnNfnNfnsnsn-3’, wherein “Nf” stands for a 2′-fluoro modified nucleotide, “n” stands for a 2′-O-methyl modified nucleotide, “s” stands for a 3′-phosphorothioate. In other instances, the sense strand comprises ‘5-nsnsnnnnNfnNfNfNfnnnnnnnnnn-3’, wherein the antisense strand comprises ‘5-nsNfsnnnNfnNfNfnnnnNfnNfnnnnnsnsn-3’, wherein “Nf” stands for a 2′-fluoro modified nucleotide, “n” stands for a 2′-O-methyl modified nucleotide, “s” stands for a 3′-phosphorothioate. In other instances, the sense strand comprises ‘5-nsnsnnnnnnNfnNfnnnnnnnnnn-3’, wherein the antisense strand comprises ‘5-nsNfsnnnnnnnnnNfnNfhnnnnnnsnsn-3’, wherein “Nf” stands for a 2′-fluoro modified nucleotide, “n” stands for a 2′-O-methyl modified nucleotide, “s” stands for a 3′-phosphorothioate. In other instances, the sense strand comprises ‘5-nsnsnnnnNfnNfnNfnnnnnnnnnn-3’, wherein the antisense strand comprises ‘5-nsNfsnnnnnnnnnNfnNfnNfnnnnnsnsn-3’, wherein “Nf” stands for a 2′-fluoro modified nucleotide, “n” stands for a 2′-O-methyl modified nucleotide, “s” stands for a 3′-phosphorothioate.

[0012] In some instances, the modified internucleotide linkage is a phosphorothioate linkage. In some instances, the modified internucleotide linkage comprises a stereochemically enriched phosphorothioate internucleotide linkage. In some instances, the modified internucleotide linkage is an SP chiral internucleotide phosphorothioate linkage. In some instances, the polynucleic acid comprises a plurality of modified internucleotide linkages, and at least 1, 2, 3, or 4 of the plurality of modified internucleotide linkages are stereochemically enriched phosphorothioate internucleotide linkages. In some instances, the stereochemically enriched phosphorothioate internucleotide linkages comprise both R- and S-isomers. In some instances, the at least one stereochemically enriched phosphorothioate is disposed between two consecutive nucleosides that are two of six 5′ or 3′-terminal nucleosides of the sense strand or the antisense strand.

[0013] In some instances, the polynucleic acid molecule comprises a hypoxanthine nucleobase-containing nucleoside substitution. In some instances, the hypoxanthine nucleobase-containing nucleoside substitution is an inosine substitution. In some instances, the inosine substitution is within a seed region of the antisense strand. In some instances, the inosine substitution is within 7 nucleotides from the 5′ end of the antisense strand. In some instances, the polynucleic acid molecule comprises an abasic substitution. In some instances, the abasic substitution is at the 5^{th} or 7^{th} nucleotide from the 5′ end.

[0014] In some instances, the cytotoxicity of the polynucleic acid molecule is decreased compared to unmodified polynucleic acid.

[0015] In some instances, the sense strand comprises a nucleic acid sequence that is at least 80%, at least 85%, at least 90%, at least 95% identical to a sequence selected from SEQ ID NOs: 13, 15, 17, 19, 21, and 128-230. In some instances, the sense strand comprises a nucleic acid sequence comprising at least 14, 15, 16, 17, 18, 19, or 20 consecutive nucleotides of a sequence selected from SEQ ID NOs: 13, 15, 17, 19, 21, and 128-230 with no more than 1, 2, 3, or 4 mismatches. In other instances, the antisense strand comprises a nucleic acid sequence that is at least 80%, at least 85%, at least 90%, at least 95% identical to a sequence selected from SEQ ID NOs: 14, 16, 18, 20, 22, and 334-436. In other instances, the antisense strand comprises a nucleic acid sequence comprising at least 14, 15, 16, 17, 18, 19, or 20 consecutive nucleotides of a sequence selected from SEQ ID NOs: 14, 16, 18, 20, 22, and 334-436 with no more than 1, 2, 3, or 4 mismatches. In some instances the sense strand comprises a sequence selected from a nucleic acid sequence of SEQ ID NOs: 13, 15, 17, 19, 21, and 128-230 and the antisense strand comprises a sequence selected from a nucleic acid sequence of SEQ ID NOs: 14, 16, 18, 20, 22, and 334-436. In some instances, the sense strand comprises a nucleic acid sequence that is at least 80%, at least 85%, at least 90%, at least 95% identical to a sequence selected from SEQ ID NOs: 13, 15, 17, 19, and 21. In some instances, the sense strand comprises a nucleic acid sequence comprising at least 14, 15, 16, 17, 18, 19, or 20 consecutive nucleotides of a sequence selected from SEQ ID NOs: 13, 15, 17, 19, and 21 with no more than 1, 2, 3, or 4 mismatches. In other instances, the antisense strand comprises a nucleic acid sequence that is at least 80%, at least 85%, at least 90%, at least 95% identical to a sequence selected from SEQ ID NOs: 14, 16, 18, 20, and 22. In other instances, the antisense strand comprises a nucleic acid sequence comprising at least 14, 15, 16, 17, 18, 19, or 20 consecutive nucleotides of a sequence selected from SEQ ID NOs: 14, 16, 18, 20, and 22 with no more than 1, 2, 3, or 4 mismatches. In some instances the sense strand comprises a sequence selected from a nucleic acid sequence of SEQ ID NOs: 13, 15, 17, 19, and 21 and the antisense strand comprises a sequence selected from a nucleic acid sequence of SEQ ID NOs: 14, 16, 18, 20, and 22.

[0016] In some instances, the polynucleic acid molecule is 19-25 base pairs in length. In some instances, the polynucleic acid molecule is 16-30 base pairs in length. In other instances, the polynucleic acid molecule is 21-23 base pairs in length. In other instances, the polynucleic acid molecule is 19-25 base pairs in length.

[0017] A polynucleic acid molecule for modulating expression of proprotein convertase subtilisin/kexin type 9 serine protease (PCSK9) gene, wherein polynucleic acid molecule comprises: (a) an antisense strand comprising the nucleotide sequence of usUfsacaaaagcaAfaAfcAfggucusasg (SEQ ID NO: 14) and a sense strand comprising the nucleotide sequence of asgsaccuGfuUfuUfgcuuuuguaa (SEQ ID NO:13); or (b) an antisense strand comprising the nucleotide sequence of usUfsucaaguuacAfaAfaGfcaaaascsa-(SEQ ID NO:16) and a sense strand comprising the nucleotide sequence of ususuugcUfuUfuGfuaacuugaaa (SEQ ID NO:15); wherein smaller case “n” stands for 2′-O-methyl modified nucleotide, upper case followed with an “f” (i.e., “Nf”) stands for 2′-fluoro modified nucleotide, and “s” stands for 3′-phosphorothioate.

[0018] In some aspects, disclosed herein are polynucleic acid molecule conjugates for modulating expression of PCSK9 gene, wherein the polynucleic acid molecule conjugate comprises a polynucleic acid molecules described herein and an asialoglycoprotein receptor targeting moiety. In some instances, the polynucleic acid molecule and the asialoglycoprotein receptor targeting moiety is coupled via a linker. In some instances, the linker comprises formula (IV) below,

[chemical structure]

wherein at least one of Y1 and Y2 is a nucleotide in the polynucleic acid molecule. In some instances, the Y1 is the last nucleotide on the 3′-terminus of the sense strand of the polynucleic acid molecule. In other instances, the Y1 and Y2 are two consecutive nucleotides in the polynucleic acid molecule. In some instances, asialoglycoprotein receptor targeting moiety comprises N-Acetylgalactosamine (GalNAc). In some instances, the linker and the asialoglycoprotein receptor targeting moiety with the last nucleotide on the 3′-terminus of the sense strand of the polynucleic acid molecule are shown in Formula (V′):

[chemical structure]

(V′), wherein Z in formula (V′) is —H, —OH, —O-Methyl, —F, or —O-methoxyethyl, and R in formula (V′) is adenine, uracil, guanine, cytosine, thymine, abasic, or others.

[0019] In some aspects, provided herein are pharmaceutical compositions comprising a polynucleic acid molecules described herein or a polynucleic acid molecule conjugates described herein, and a pharmaceutically acceptable excipient. In some instances, the pharmaceutical composition is formulated as a nanoparticle formulation. In some instances, the pharmaceutical composition is formulated for parenteral, oral, intranasal, buccal, rectal, transdermal, intravenous, subcutaneous, or intrathecal administration.

[0020] In some aspects, provided herein are methods of modulating expression of PCSK9 gene in a subject, comprising: administering to the subject the polynucleic acid molecules described herein, the polynucleic acid molecule conjugates described herein, or the pharmaceutical compositions described herein, thereby modulating the expression of PCSK9 gene in the subject.

[0021] In other aspects, provided herein are methods of modulating low-density lipoproteins (LDL) in a subject in need thereof, comprising: administering to the subject the polynucleic acid molecules described herein, the polynucleic acid molecule conjugates described herein, or the pharmaceutical compositions described herein, wherein the polynucleic acid molecules described herein, polynucleic acid molecule conjugates described herein, or pharmaceutical compositions described herein reduces the expression of PCSK9 gene in the subject. In some instances, the subject in need thereof suffers from hypercholesterolemia, familial hypercholesterolemia, or other high cholesterol-associated diseases.

[0022] In some aspects, provided herein are methods of modulating cholesterol in a subject in need thereof, comprising: administering to the subject the polynucleic acid molecules described herein, the polynucleic acid molecule conjugates described herein, or the pharmaceutical compositions described herein, wherein the polynucleic acid molecules described herein, the polynucleic acid molecule conjugates described herein, or the pharmaceutical compositions described herein reduces the expression of PCSK9 gene in the subject. In some instances, the subject in need thereof suffers from hypercholesterolemia, familial hypercholesterolemia, or other high cholesterol-associated diseases.

### BRIEF DESCRIPTION OF THE DRAWINGS

[0023] Various aspects of the disclosure are set forth with particularity in the appended claims. A better understanding of the features and advantages of the present disclosure will be obtained by reference to the following detailed description that sets forth illustrative aspects, in which the principles of the disclosure are utilized, and the accompanying drawings below.

[0024] FIGS. 1A-1J show effects of multiple siRNAs on PCSK9 level, LDL-c level, triglyceride (TG) levels, HDL-c levels, and total cholesterol (T-Chol) level in non-human primates.

### DETAILED DESCRIPTION OF THE DISCLOSURE

[0025] PCSK9 is the ninth member of the mammalian family of serine proteinases, a group of protein convertases that cleave inactive secretory precursors into bioactive proteins and peptides. The human PCSK9 gene is located on chromosome 1p32.3 and is translated into a ˜82-kDa zymogen in the endoplasmic reticulum (see Abifadel et al., 2003, Nat. Genet. 34, 154-156.; Piper et al., 2007, Structure 15, 545-552). PCSK9 is mainly secreted by hepatocytes into the blood stream and exists in the plasma.

[0026] PCSK9 has been shown to be involved in the degradation of LDL-cholesterol (LDL-C) and a subsequent condition hypercholesterolemia (see Abifadel et al., 2003, Nat. Genet. 34, 154-156). Hypercholesterolemia occurs as a consequence of a high-fat diet, inactivity, and combined with certain genetic risk factors. High levels of LDL are well-recognized risk factors. Exemplary genetic risk factors that are associated with hypercholesterolemia include mutations of genes encoding proteins that influence the level of LDL in the blood. For example, gain-of-function mutations in the gene encoding PCSK9 are associated with hypercholesterolemia. Upon PCSK9's binding to the LDLR, LDLR undergoes degradation, which consequently reduces the uptake of LDL-C from the bloodstream, thereby leading to hypercholesterolemia. Therefore, inhibition of PCSK9 is viewed as a potential therapeutic strategy to treat hypercholesterolemia, especially familial hypercholesterolemia, and other cholesterol-associated diseases.

[0027] Besides livers, PCSK9 is expressed in the small intestines, kidneys, and brains. Specifically, PCSK9 has been involved in neuroinflammation (see Apaijai et al., 2019, J. Am. Heart Assoc. 8:e010838). In addition, PCSK9 is associated with pathogenesis of Alzheimer's Disease. Brain autopsies reveal elevated PCSK9 mRNA and protein levels in the frontal cortices of late-onset AD patients compared to controls (see Picard et al., 2019, PLoS One 14:e0220254). Furthermore, PCSK9 participates in AUD, with an observation that PCSK9 levels in the CSF of patients with AUD were significantly higher compared to controls (see Chen et al., 2014, Lipids 49, 445-455). Furthermore, ischemic stroke is associated with several gain-of-function mutations in the PCSK9 gene that cause increased plasma LDL-C (see Rousselet et al., 2011, J. Lipid Res. 52, 1383-1391). Therefore, developing therapeutics targeting PCSK9 can be helpful for the above-mentioned neuronal disorders.

[0028] Described herein is a polynucleic acid molecule for modulating expression of PCSK9 gene, wherein the polynucleic acid molecule comprises a sense strand and an antisense strand, and wherein the polynucleic acid molecule comprises a nucleic acid sequence in Table 1, Table 2, and Table 3. Accordingly, provided herein are various target regions of human PCSK9 mRNA the polynucleic acid molecule described herein hybridizes to. In some embodiments, provided herein is the sequences of the polynucleic acid molecule described herein. In some embodiments, provided herein is the possible modifications of the polynucleic acid molecule described herein. In some embodiments, provided herein is the possible conjugates of the polynucleic acid molecule described herein.

[0029] Also described herein is a method of modulating expression of proprotein convertase subtilisin/kexin type 9 serine protease (PCSK9) gene in a subject. Described further herein is a method of modulating LDL and/or cholesterol in a subject in need thereof.

### Polynucleic Acid Molecules

### Target Regions of Polynucleic Acid Molecules

[0030] Described herein is a polynucleic acid molecule for modulating expression of PCSK9 gene. In some aspects, the polynucleic acid molecule is a single-stranded nucleic acid molecule that hybridizes to certain regions of mRNA. In some aspects, the polynucleic acid molecule is a double-stranded nucleic acid molecule. In some instances, the polynucleic acid molecule comprises a sense strand and an antisense strand, and wherein the antisense strand hybridizes to certain regions of PCSK9 mRNA.

[0031] In some aspects, the polynucleic acid molecule described herein hybridizes to certain regions of human PCSK9 mRNA. In some aspects, the polynucleic acid molecule described herein hybridizes to certain regions of non-human PCSK9 mRNA.

[0032] In some aspects, the polynucleic acid molecule described herein hybridizes to the 5′ UTR region of human PCSK9 mRNA. In some aspects, the polynucleic acid molecule described herein hybridizes to the coding region of human PCSK9 mRNA. In some aspects, the polynucleic acid molecule described herein hybridizes to the 3′ UTR region of human PCSK9 mRNA. In some specific aspects, the polynucleic acid molecule described herein hybridizes to a subset of 3′ UTR of human PCSK9 mRNA (NCBI Reference Sequence: NM-174936.3) with a range of transcription starting sites from 2342 to 2441, from 2442 to 2541, from 2542 to 2641, from 2642 to 2741, from 2742 to 2841, from 2842 to 2941, from 2942 to 3041, from 3042 to 3141, from 3142 to 3241, from 3242 to 3341, from 3342 to 3441, from 3442 to 3541, from 3542 to 3641, from 3642 to 3731.

[0033] In some aspects, the target region that the polynucleic acid molecule described herein hybridizes to is determined by an algorithm that predicts the maximal PCSK9 silencing effectiveness and lowest possible off-target effects. In some specific embodiment, the algorithm is disclosed in He et al., 2017, Scientific Reports, 7, 44836. In some specific embodiment, the algorithm is disclosed in Han et al., 2018, BMC Genomics 19, 669. In some specific embodiment, the algorithm is siRNArules, siRNA-Finder, siRNA Wizard™, siDirect, sima wizard, Dharmacon siRNA designing tool, White head siRNA designing tool, or Genscript siRNA software.

### Structure of Polynucleic Acid Molecules

### Single-Stranded Nucleic Acid Molecule

[0034] Described herein is a polynucleic acid molecule for modulating expression of PCSK9 gene, wherein the polynucleic acid molecule single-stranded nucleic acid molecule that is reverse complementary to the target region of PCSK9 mRNA as described above.

[0035] In some aspects, the polynucleic acid molecule described herein is not 100% complementary to the target region of PCSK9 mRNA. Accordingly, in some instances, the polynucleic acid molecule described herein is about 95% complementary to the target region of PCSK9 mRNA. In some specific aspects, the polynucleic acid molecule described herein is about 90% complementary to the target region of PCSK9 mRNA. In some specific aspects, the polynucleic acid molecule described herein is about 85% complementary to the target region of PCSK9 mRNA. In some specific aspects, the polynucleic acid molecule described herein is about 80% complementary to the target region of PCSK9 mRNA. In some specific aspects, the polynucleic acid molecule described herein is about 75% complementary to the target region of PCSK9 mRNA. In some specific aspects, the polynucleic acid molecule described herein is about 70% complementary to the target region of PCSK9 mRNA.

[0036] In some aspects, the polynucleic acid molecule described herein comprises a nucleic acid sequence in Table 1, Table 2, and Table 3. In other aspects, the polynucleic acid molecule described herein comprises a nucleic acid sequence that is at least 80%, at least 85%, at least 90%, at least 95% identical to a sequence in Table 1, Table 2, and Table 3. In some instances, the polynucleic acid molecule described herein comprises at least 80%, at least 85%, at least 90%, at least 95% complementary to a sequence selected from SEQ ID NOs:1, 3, 5, 7, 9, 25-127, and 437-539. In some instances, the polynucleic acid molecule described herein comprises at least 80%, at least 85%, at least 90%, at least 95% complementary to a sequence selected from SEQ ID NOs: 1, 3, 5, 7, and 9.

[0037] In yet other aspects, the polynucleic acid molecule described herein comprises a nucleic acid sequence that is 15 consecutive nucleotides out of the sequences in Table 1, Table 2, and Table 3 with no more than 2, 3, or 4 mismatches. In specific aspects, the polynucleic acid molecule described herein comprises a nucleic acid sequence that is 15 consecutive nucleotides that are complementary to a nucleic acid sequence of SEQ ID NOs: 1, 3, 5, 7, 9, 25-127, and 437-539 with no more than 2, 3, or 4 mismatches. In yet still other aspects, the polynucleic acid molecule described herein comprises a nucleic acid sequence that is 16 consecutive nucleotides out of the sequences in Table 1, Table 2, and Table 3 with no more than 2, 3, or 4 mismatches. In specific aspects, the polynucleic acid molecule described herein comprises a nucleic acid sequence that is 16 consecutive nucleotides that are complementary to a nucleic acid sequence of SEQ ID NOs: 1, 3, 5, 7, 9, 25-127, and 437-539 with no more than 2, 3, or 4 mismatches. In yet still other aspects, the polynucleic acid molecule described herein comprises a nucleic acid sequence that is 17 consecutive nucleotides out of the sequences in Table 1, Table 2, and Table 3 with no more than 2, 3, or 4 mismatches. In specific aspects, the polynucleic acid molecule described herein comprises a nucleic acid sequence that is 17 consecutive nucleotides that are complementary to a nucleic acid sequence of SEQ ID NOs: 1, 3, 5, 7, 9, 25-127, and 437-539 with no more than 2, 3, or 4 mismatches. In yet other aspects, the polynucleic acid molecule described herein comprises a nucleic acid sequence that is 18 consecutive nucleotides out of the sequences in Table 1, Table 2, and Table 3 with no more than 2, 3, or 4 mismatches. In specific aspects, the polynucleic acid molecule described herein comprises a nucleic acid sequence that is 18 consecutive nucleotides that are complementary to a nucleic acid sequence of SEQ ID NOs: 1, 3, 5, 7, 9, 25-127, and 437-539 with no more than 2, 3, or 4 mismatches. In yet other aspects, the polynucleic acid molecule described herein comprises a nucleic acid sequence that is 19 consecutive nucleotides out of the sequences in Table 1, Table 2, and Table 3 with no more than 2, 3, or 4 mismatches. In specific aspects, the polynucleic acid molecule described herein comprises a nucleic acid sequence that is 19 consecutive nucleotides that are complementary to a nucleic acid sequence of SEQ ID NOs: 1, 3, 5, 7, 9, 25-127, and 437-539 with no more than 2, 3, or 4 mismatches. In yet other aspects, the polynucleic acid molecule described herein comprises a nucleic acid sequence that is 20 consecutive nucleotides out of the sequences in Table 1, Table 2, and Table 3 with no more than 2, 3, or 4 mismatches. In specific aspects, the polynucleic acid molecule described herein comprises a nucleic acid sequence that is 20 consecutive nucleotides that are complementary to a nucleic acid sequence of SEQ ID NOs: 1, 3, 5, 7, 9, 25-127, and 437-539 with no more than 2, 3, or 4 mismatches. In yet other aspects, the polynucleic acid molecule described herein comprises a nucleic acid sequence that is 21 consecutive nucleotides out of the sequences in Table 1, Table 2, and Table 3 with no more than 2, 3, or 4 mismatches. In specific aspects, the polynucleic acid molecule described herein comprises a nucleic acid sequence that is 21 consecutive nucleotides that are complementary to a nucleic acid sequence of SEQ ID NOs: 1, 3, 5, 7, 9, 25-127, and 437-539 with no more than 2, 3, or 4 mismatches. In yet other aspects, the polynucleic acid molecule described herein comprises a nucleic acid sequence that is 22 consecutive nucleotides out of the sequences in Table 1, Table 2, and Table 3 with no more than 2, 3, or 4 mismatches. In specific aspects, the sense strand described herein comprises a nucleic acid sequence that is 22 consecutive nucleotides that are complementary to a nucleic acid sequence of SEQ ID NOs: 1, 3, 5, 7, 9, 25-127, and 437-539 with no more than 2, 3, or 4 mismatches.

[0038] In specific aspects, the polynucleic acid molecule described herein comprises a nucleic acid sequence that is 15 consecutive nucleotides that are complementary to a nucleic acid sequence of SEQ ID NOs: 1, 3, 5, 7, and 9 with no more than 1, 2, or 3 mismatches. In specific aspects, the polynucleic acid molecule described herein comprises a nucleic acid sequence that is 16 consecutive nucleotides that are complementary to a nucleic acid sequence of SEQ ID NOs: 1, 3, 5, 7, and 9 with no more than 1, 2, or 3 mismatches. In specific aspects, the polynucleic acid molecule described herein comprises a nucleic acid sequence that is 17 consecutive nucleotides that are complementary to a nucleic acid sequence of SEQ ID NOs: 1, 3, 5, 7, and 9 with no more than 1, 2, or 3 mismatches. In specific aspects, the polynucleic acid molecule described herein comprises a nucleic acid sequence that is 18 consecutive nucleotides that are complementary to a nucleic acid sequence of SEQ ID NOs: 1, 3, 5, 7, and 9 with no more than 1, 2, or 3 mismatches. In specific aspects, the polynucleic acid molecule described herein comprises a nucleic acid sequence that is 19 consecutive nucleotides that are complementary to a nucleic acid sequence of SEQ ID NOs: 1, 3, 5, 7, and 9 with no more than 1, 2, or 3 mismatches. In specific aspects, the polynucleic acid molecule described herein comprises a nucleic acid sequence that is 20 consecutive nucleotides that are complementary to a nucleic acid sequence of SEQ ID NOs: 1, 3, 5, 7, and 9 with no more than 1, 2, or 3 mismatches. In specific aspects, the polynucleic acid molecule described herein comprises a nucleic acid sequence that is 21 consecutive nucleotides that are complementary to a nucleic acid sequence of SEQ ID NOs: 1, 3, 5, 7, and 9 with no more than 1, 2, or 3 mismatches. In specific aspects, the polynucleic acid molecule described herein comprises a nucleic acid sequence that is 22 consecutive nucleotides that are complementary to a nucleic acid sequence of SEQ ID NOs: 1, 3, 5, 7, and 9 with no more than 1, 2, or 3 mismatches.

[0039] In some aspects, the polynucleic acid molecule described herein comprises about 15-30, 16-30, 17-30, 18-30, 18-27, 18-25, 18-23, 19-23, 20-23, or 21-23 nucleotides in length. In some aspects, the polynucleic acid molecule described herein comprises about 15, 16, 17, 18, 19, 20 nucleotides long. In some aspects, the polynucleic acid molecule described herein comprises about 21, 22, 23, 24, 25 nucleotides long. In some aspects, the polynucleic acid molecule described herein comprises about 26, 27, 28, 29, 30 nucleotides long. In some specific aspects, the polynucleic acid molecule described herein comprises 19 nucleotides long. In some specific aspects, the polynucleic acid molecule described herein comprises 21 nucleotides long. In some specific aspects, the polynucleic acid molecule described herein comprises 23 nucleotides long.

### Double-Stranded Nucleic Acid Molecule

[0040] Described herein is a polynucleic acid molecule for modulating expression of PCSK9 gene, wherein the polynucleic acid molecule is a double-stranded molecule that comprises a sense strand and an antisense strand, and wherein the antisense strand is reverse complementary to the target region of PCSK9 mRNA as described above.

[0041] In some aspects, the antisense strand described herein is 100% complementary to the target region of PCSK9 mRNA. In some aspects, the antisense strand described herein is not 100% complementary to the target region of PCSK9 mRNA. Accordingly, in some instances, the antisense strand described herein is about 95% complementary to the target region of PCSK9 mRNA. In some specific aspects, the antisense strand described herein is about 90% complementary to the target region of PCSK9 mRNA. In some specific aspects, the antisense strand described herein is about 85% complementary to the target region of PCSK9 mRNA. In some specific aspects, the antisense strand described herein is about 80% complementary to the target region of PCSK9 mRNA. In some specific aspects, the antisense strand described herein is about 75% complementary to the target region of PCSK9 mRNA. In some specific aspects, the antisense strand described herein is about 70% complementary to the target region of PCSK9 mRNA.

[0042] In some aspects, the polynucleic acid molecule described herein comprises a nucleic acid sequence in Table 1, Table 2, and Table 3. In other aspects, the polynucleic acid molecule described herein comprises a nucleic acid sequence that is at least 80%, at least 85%, at least 90%, at least 95% identical to a sequence in Table 1, Table 2, and Table 3. In some instances, the sense strand described herein comprises at least 80%, at least 85%, at least 90%, at least 95% identical to a sequence selected from SEQ ID NOs:1, 3, 5, 7, 9, 25-127, and 437-539. In some instances, the antisense strand described herein comprises at least 80%, at least 85%, at least 90%, at least 95% identical to a sequence selected from SEQ ID NOs:2, 4, 6, 8, 10, and 231-333. In some instances, the sense strand described herein comprises at least 80%, at least 85%, at least 90%, at least 95% identical to a sequence selected from SEQ ID NOs: 1, 3, 5, 7, and 9. In some instances, the antisense strand described herein comprises at least 80%, at least 85%, at least 90%, at least 95% identical to a sequence selected from SEQ ID NOs: 2, 4, 6, 8, and 10.

[0043] In yet other aspects, the polynucleic acid molecule described herein comprises a nucleic acid sequence that is 14 consecutive nucleotides out of the sequences in Table 1, Table 2, and Table 3 with no more than 1, 2, 3, or 4 mismatches. In specific aspects, the sense strand described herein comprises a nucleic acid sequence that is 14 consecutive nucleotides of SEQ ID NOs: 1, 3, 5, 7, 9, 25-127, and 437-539 with no more than 1, 2, 3, or 4 mismatches. In specific aspects, the antisense strand described herein comprises a nucleic acid sequence that is 14 consecutive nucleotides of SEQ ID NOs: 2, 4, 6, 8, 10, and 231-333 with no more than 1, 2, 3, or 4 mismatches. In yet other aspects, the polynucleic acid molecule described herein comprises a nucleic acid sequence that is 15 consecutive nucleotides out of the sequences in Table 1, Table 2, and Table 3 with no more than 1, 2, 3, or 4 mismatches. In specific aspects, the sense strand described herein comprises a nucleic acid sequence that is 15 consecutive nucleotides of SEQ ID NOs: 1, 3, 5, 7, 9, 25-127, and 437-539 with no more than 1, 2, 3, or 4 mismatches. In specific aspects, the antisense strand described herein comprises a nucleic acid sequence that is 15 consecutive nucleotides of SEQ ID NOs: 2, 4, 6, 8, 10, and 231-333 with no more than 1, 2, 3, or 4 mismatches. In yet still other aspects, the polynucleic acid molecule described herein comprises a nucleic acid sequence that is 16 consecutive nucleotides out of the sequences in Table 1, Table 2, and Table 3 with no more than 1, 2, 3, or 4 mismatches. In specific aspects, the sense strand described herein comprises a nucleic acid sequence that is 16 consecutive nucleotides of SEQ ID NOs: 1, 3, 5, 7, 9, 25-127, and 437-539 with no more than 1, 2, 3, or 4 mismatches. In specific aspects, the antisense strand described herein comprises a nucleic acid sequence that is 16 consecutive nucleotides of SEQ ID NOs: 2, 4, 6, 8, 10, and 231-333 with no more than 1, 2, 3, or 4 mismatches. In yet still other aspects, the polynucleic acid molecule described herein comprises a nucleic acid sequence that is 17 consecutive nucleotides out of the sequences in Table 1, Table 2, and Table 3 with no more than 1, 2, 3, or 4 mismatches. In specific aspects, the sense strand described herein comprises a nucleic acid sequence that is 17 consecutive nucleotides of SEQ ID NOs: 1, 3, 5, 7, 9, 25-127, and 437-539 with no more than 1, 2, 3, or 4 mismatches. In specific aspects, the antisense strand described herein comprises a nucleic acid sequence that is 17 consecutive nucleotides of SEQ ID NOs: 2, 4, 6, 8, 10, and 231-333 with no more than 1, 2, 3, or 4 mismatches. In yet other aspects, the polynucleic acid molecule described herein comprises a nucleic acid sequence that is 18 consecutive nucleotides out of the sequences in Table 1, Table 2, and Table 3 with no more than 1, 2, 3, or 4 mismatches. In specific aspects, the sense strand described herein comprises a nucleic acid sequence that is 18 consecutive nucleotides of SEQ ID NOs: 1, 3, 5, 7, 9, 25-127, and 437-539 with no more than 1, 2, 3, or 4 mismatches. In specific aspects, the antisense strand described herein comprises a nucleic acid sequence that is 18 consecutive nucleotides of SEQ ID NOs: 2, 4, 6, 8, 10, and 231-333 with no more than 1, 2, 3, or 4 mismatches. In yet other aspects, the polynucleic acid molecule described herein comprises a nucleic acid sequence that is 19 consecutive nucleotides out of the sequences in Table 1, Table 2, and Table 3 with no more than 1, 2, 3, or 4 mismatches. In specific aspects, the sense strand described herein comprises a nucleic acid sequence that is 19 consecutive nucleotides of SEQ ID NOs: 1, 3, 5, 7, 9, 25-127, and 437-539 with no more than 1, 2, 3, or 4 mismatches. In specific aspects, the antisense strand described herein comprises a nucleic acid sequence that is 19 consecutive nucleotides of SEQ ID NOs: 2, 4, 6, 8, 10, and 231-333 with no more than 1, 2, 3, or 4 mismatches. In yet other aspects, the polynucleic acid molecule described herein comprises a nucleic acid sequence that is 20 consecutive nucleotides out of the sequences in Table 1, Table 2, and Table 3 with no more than 1, 2, 3, or 4 mismatches. In specific aspects, the sense strand described herein comprises a nucleic acid sequence that is 20 consecutive nucleotides of SEQ ID NOs: 1, 3, 5, 7, 9, 25-127, and 437-539 with no more than 1, 2, 3, or 4 mismatches. In specific aspects, the antisense strand described herein comprises a nucleic acid sequence that is 20 consecutive nucleotides of SEQ ID NOs: 2, 4, 6, 8, 10, and 231-333 with no more than 1, 2, 3, or 4 mismatches. In yet other aspects, the polynucleic acid molecule described herein comprises a nucleic acid sequence that is 21 consecutive nucleotides out of the sequences in Table 1, Table 2, and Table 3 with no more than 1, 2, 3, or 4 mismatches. In specific aspects, the sense strand described herein comprises a nucleic acid sequence that is 21 consecutive nucleotides of SEQ ID NOs: 1, 3, 5, 7, 9, 25-127, and 437-539 with no more than 1, 2, 3, or 4 mismatches. In specific aspects, the antisense strand described herein comprises a nucleic acid sequence that is 21 consecutive nucleotides of SEQ ID NOs: 2, 4, 6, 8, 10, and 231-333 with no more than 1, 2, 3, or 4 mismatches. In yet other aspects, the polynucleic acid molecule described herein comprises a nucleic acid sequence that is 22 consecutive nucleotides out of the sequences in Table 1, Table 2, and Table 3 with no more than 1, 2, 3, or 4 mismatches. In specific aspects, the sense strand described herein comprises a nucleic acid sequence that is 22 consecutive nucleotides of SEQ ID NOs: 1, 3, 5, 7, 9, 25-127, and 437-539 with no more than 1, 2, 3, or 4 mismatches. In specific aspects, the antisense strand described herein comprises a nucleic acid sequence that is 22 consecutive nucleotides of SEQ ID NOs: 2, 4, 6, 8, 10, and 231-333 with no more than 1, 2, 3, or 4 mismatches.

[0044] In specific aspects, the sense strand described herein comprises a nucleic acid sequence that is 14 consecutive nucleotides of SEQ ID NOs: 1, 3, 5, 7, and 9 with no more than 1, 2, or 3 mismatches. In specific aspects, the antisense strand described herein comprises a nucleic acid sequence that is 14 consecutive nucleotides of SEQ ID NOs: 2, 4, 6, 8, and 10 with no more than 1, 2, or 3 mismatches. In specific aspects, the sense strand described herein comprises a nucleic acid sequence that is 15 consecutive nucleotides of SEQ ID NOs: 1, 3, 5, 7, and 9 with no more than 1, 2, or 3 mismatches. In specific aspects, the antisense strand described herein comprises a nucleic acid sequence that is 15 consecutive nucleotides of SEQ ID NOs: 2, 4, 6, 8, and 10 with no more than 1, 2, or 3 mismatches. In specific aspects, the sense strand described herein comprises a nucleic acid sequence that is 16 consecutive nucleotides of SEQ ID NOs: 1, 3, 5, 7, and 9 with no more than 1, 2, or 3 mismatches. In specific aspects, the antisense strand described herein comprises a nucleic acid sequence that is 16 consecutive nucleotides of SEQ ID NOs: 2, 4, 6, 8, and 10 with no more than 1, 2, or 3 mismatches. In specific aspects, the sense strand described herein comprises a nucleic acid sequence that is 17 consecutive nucleotides of SEQ ID NOs: 1, 3, 5, 7, and 9 with no more than 1, 2, or 3 mismatches. In specific aspects, the antisense strand described herein comprises a nucleic acid sequence that is 17 consecutive nucleotides of SEQ ID NOs: 2, 4, 6, 8, and 10 with no more than 1, 2, or 3 mismatches. In specific aspects, the sense strand described herein comprises a nucleic acid sequence that is 18 consecutive nucleotides of SEQ ID NOs: 1, 3, 5, 7, and 9 with no more than 1, 2, or 3 mismatches. In specific aspects, the antisense strand described herein comprises a nucleic acid sequence that is 18 consecutive nucleotides of SEQ ID NOs: 2, 4, 6, 8, and 10 with no more than 1, 2, or 3 mismatches. In specific aspects, the sense strand described herein comprises a nucleic acid sequence that is 19 consecutive nucleotides of SEQ ID NOs: 1, 3, 5, 7, and 9 with no more than 1, 2, or 3 mismatches. In specific aspects, the antisense strand described herein comprises a nucleic acid sequence that is 19 consecutive nucleotides of SEQ ID NOs: 2, 4, 6, 8, and 10 with no more than 1, 2, or 3 mismatches. In specific aspects, the sense strand described herein comprises a nucleic acid sequence that is 20 consecutive nucleotides of SEQ ID NOs: 1, 3, 5, 7, and 9 with no more than 1, 2, or 3 mismatches. In specific aspects, the antisense strand described herein comprises a nucleic acid sequence that is 20 consecutive nucleotides of SEQ ID NOs: 2, 4, 6, 8, and 10 with no more than 1, 2, or 3 mismatches. In specific aspects, the sense strand described herein comprises a nucleic acid sequence that is 21 consecutive nucleotides of SEQ ID NOs: 1, 3, 5, 7, and 9 with no more than 1, 2, or 3 mismatches. In specific aspects, the antisense strand described herein comprises a nucleic acid sequence that is 21 consecutive nucleotides of SEQ ID NOs: 2, 4, 6, 8, and 10 with no more than 1, 2, or 3 mismatches. In specific aspects, the sense strand described herein comprises a nucleic acid sequence that is 22 consecutive nucleotides of SEQ ID NOs: 1, 3, 5, 7, and 9 with no more than 1, 2, or 3 mismatches. In specific aspects, the antisense strand described herein comprises a nucleic acid sequence that is 22 consecutive nucleotides of SEQ ID NOs: 2, 4, 6, 8, and 10 with no more than 1, 2, or 3 mismatches.

[0045] In some aspects, the polynucleic acid molecule described herein comprises a sense and an antisense strand of about 15-30, 16-30, 17-30, 18-30, 18-27, 18-25, 18-23, 19-23, 20-23, or 21-23 nucleotides in length. In some aspects, the polynucleic acid molecule described herein comprises a sense and an antisense strand of about 15, 16, 17, 18, 19, 20 nucleotides long. In some aspects, the polynucleic acid molecule described herein comprises a sense and an antisense strand of about 21, 22, 23, 24, 25 nucleotides long. In some aspects, the polynucleic acid molecule described herein comprises a sense and an antisense strand of about 26, 27, 28, 29, 30 nucleotides long. In some specific aspects, the polynucleic acid molecule described herein comprises a sense strand of 19 nucleotides long, and an antisense strand of about 21 nucleotides long. In some specific aspects, the polynucleic acid molecule described herein comprises a sense strand of 21 nucleotides long, and an antisense strand of about 23 nucleotides long.

[0046] In some aspects, the sense strand and the antisense strand described herein are reverse complementary to each other and form a duplex with a 3′ overhang on the antisense strand. In some aspects, the sense strand and the antisense strand described herein are reverse complementary to each other and form a duplex with a 5′ overhang on the antisense strand. In some aspects, the sense strand and the antisense strand described herein are reverse complementary to each other and form a duplex with a 3′ overhang on the sense strand. In some aspects, the sense strand and the antisense strand described herein are reverse complementary to each other and form a duplex with a 5′ overhang on the sense strand.

### Modifications of Polynucleic Acid Molecules

[0047] In some aspects, described herein is the polynucleic acid molecule described herein with modifications. In some aspects, the modifications described herein occurs one or more different structures of the polynucleotide acid molecule described herein (e.g., modifications on sugar ring(s), backbone(s), base(s)). In some aspects, the modifications described herein comprise substitutions of one or more nucleotide in the polynucleic acid molecule described herein. In some aspects, different percentages of the polynucleic acid molecule described herein comprise the modifications described herein. In some aspects, different positions of the polynucleic acid molecule described herein comprise the modifications described herein. WO/2018/035380 is herein incorporated by reference in its entirety.

### Types of Modifications

[0048] In some aspects, the polynucleotide acid molecule described herein comprises one or more sugar-modified nucleotide. In some aspects, the sugar-modified nucleotide is a 2′-fluoro modified nucleotide. In some instances, the sugar-modified nucleotide includes a modification at a 2′ hydroxyl group of the ribose moiety. In some instances, the sugar-modified nucleotide includes modification with an H, OR, R, halo, SH, SR, NH2, NHR, NR2, or CN, wherein R is an alkyl moiety. In some aspects, the sugar-modified nucleotide is a 2′-O-methyl modified nucleotide or 2′-alkoxy modified nucleotide (e.g., 2′-methoxy modified nucleotide). In some instances, 2′ hydroxyl group modification includes 2′-deoxy, 2′-deoxy-2′-fluoro, 2′-O-aminopropyl (2′-O-AP), 2′-O-dimethylaminoethyl (2′-O-DMAOE), 2′-O-dimethylaminopropyl (2′-O-DMAP), 2′-O-dimethylaminoethyloxyethyl (2′-O-DMAEOE), or 2′-O—N-methylacetamido (2′-O-NMA). In some instances, the alkyl moiety comprises a hetero substitution. In some instances, the carbon of the heterocyclic group is substituted by a nitrogen, oxygen or sulfur. In some aspects, the sugar-modified nucleotide is a 2′-amino modified nucleotide. In some aspects, the sugar-modified nucleotide is a 2′-azido modified nucleotide. In some aspects, the sugar-modified nucleotide is a 2′-deoxy modified nucleotide. In some aspects, the sugar-modified nucleotide is a 2′-O-methoxythyl (2′-MOE). In some aspects, the sugar-modified nucleotide is a locked nucleic acid (LNA). In some aspects, the sugar-modified nucleotide is an ethylene-bridged nucleic acid (ENA). In some aspects, the sugar-modified nucleotide is a (S)-constrained ethyl (cEt). In some aspects, the sugar-modified nucleotide is a tricyclo-DNA (tcDNA). In some aspects, the sugar-modified nucleotide is a 2′-NH2 nucleic acid.

[0049] In some aspects, the polynucleotide acid molecule described herein comprises one or more sugarphosphate-modified nucleotide. In some aspects, the modified sugarphosphate is phosphorodiamidate morpholino (PMO). In some aspects, the modified sugarphosphate is phosphoramidate. In some instances, the heterocyclic substitution includes imidazole, and pyrrolidino. In some aspects, the modified sugarphosphate is thiophosphoramidate. In some aspects, the modified sugarphosphate is peptide nucleic acid (PNA).

[0050] In some aspects, the polynucleotide acid molecule described herein comprises one or more backbone-modified nucleotide. In some specific aspects, the modified backbone is a methylphosphonate. In some specific aspects, the modified backbone is phosphorothioate. In some specific aspects, the modified backbone is a guanidinopropyl phosphoramidate. In some specific aspects, the modified backbone is a mesyl-phosphoramidate (MsPA) linkages. In some instances, the modified backbone comprises one or more of phosphorodithioates, methylphosphonates, 5′-alkylenephosphonates, 5′-methylphosphonate, 3′-alkylene phosphonates, borontrifluoridates, borano phosphate esters and selenophosphates of 3′-5′ linkage or 2′-5′ linkage, phosphotriesters, thionoalkylphosphotriesters, hydrogen phosphonate linkages, alkyl phosphonates, alkylphosphonothioates, arylphosphonothioates, phosphoroselenoates, phosphoramidates.

[0051] In some aspects, the modified nucleotide comprises a modified guanine (e.g., inosine) or one or more of any types of unnatural nucleic acids.

[0052] In some specific aspects, the modified backbone is phosphorothioate, and the phosphorothioate is a stereochemically enriched phosphorothioate. In certain aspects, the strand contains at least one stereochemically enriched phosphorothioate. In some aspects, the strand comprises at least 1, 2, 3 stereochemically enriched phosphorothioates. In some aspects, the strand comprises only 1, 2, 3, or 4 stereochemically enriched phosphorothioates. In further aspects, at least one (e.g., one or two) stereochemically enriched phosphorothioate is disposed between two consecutive nucleosides that are two of six 5′-terminal nucleosides of the strand. In yet further aspects, at least one (e.g., one or two) stereochemically enriched phosphorothioate is disposed between two consecutive nucleosides that are two of six 3′-terminal nucleosides of the strand. In still further aspects, one stereochemically enriched phosphorothioate is covalently bonded to the first nucleoside and the second nucleoside from the 5′-end within the strand. In some aspects, one stereochemically enriched phosphorothioate is covalently bonded to the twenty first nucleoside and the twenty second nucleoside from the 5′-end within the strand. In certain aspects, one stereochemically enriched phosphorothioate is covalently bonded to the twenty second nucleoside and the twenty third nucleoside from the 5′-end within the strand. In particular aspects, the stereochemically enriched phosphorothioate has RP stereochemical identity. In certain aspects, the stereochemically enriched phosphorothioate has SP stereochemical identity.

[0053] In some aspects, the polynucleotide molecules described herein comprises one or more (e.g., from 1 to 20, from 1 to 10, or from 1 to 5) stereochemically enriched (e.g., internucleoside) phosphorothioates (e.g., having diastereomeric excess of at least 10%, at least 50%, at least 60%, at least 70%, at least 80%, or at least 90%, e.g., up to about 99%, for the P-stereogenic center). The polynucleotide molecules described herein comprises one or more (e.g., from 1 to 20, from 1 to 10, or from 1 to 5; e.g., internucleoside) phosphorodithioates. The phosphorodithioates may be non-P-stereogenic in the polynucleotide molecules described herein. Phosphorothioates and phosphorodithioates may enhance the stability of the polynucleotide molecules described herein to exonuclease activity of serum. Non-P-stereogenic phosphorodithioates may simplify the synthesis of the polynucleotide molecule described herein by reducing the number of possible diastereomers. Typically, the phosphorothioate or phosphorodithioate may connect two contiguous nucleosides within the six 3′-terminal nucleosides and the six 5′-terminal nucleosides of the polynucleotide molecules described herein. In some aspects, the stereochemically enriched phosphorothioate (e.g., RP-enriched phosphorothioate) may be covalently bonded to the first nucleoside (e.g., the 3′-carbon atom of the first nucleoside) and the second nucleoside (e.g., the 5′-carbon atom of the second nucleoside) from the 5′-end of the antisense strand. Additionally or alternatively, the stereochemically enriched phosphorothioate (e.g., SP-enriched phosphorothioate) may be covalently bonded to the 21^{st} nucleoside (e.g., the 3′-carbon atom of the 21^{st} nucleoside) from the 5′-end and the 22^{nd} nucleoside (e.g., the 5′-carbon atom of the 22^{nd} nucleoside) of the antisense strand. Further, additionally or alternatively, the stereochemically enriched phosphorothioate (e.g., SP-enriched phosphorothioate) may be covalently bonded to the 22^{nd} nucleoside (e.g., the 3′-carbon atom of the 22^{nd} nucleoside) and the 23^{rd} nucleoside (e.g., the 5′-carbon atom of the 23^{rd} nucleoside) from the 5′-end of the antisense strand. Combinations of a 5′ RP-enriched phosphorothioate (e.g., RP-enriched phosphorothioate covalently bonded to the first nucleoside (e.g., the 3′-carbon atom of the first nucleoside) and the second nucleoside (e.g., the 5′-carbon atom of the second nucleoside) from the 5′-end and a 3′ SP-enriched phosphorothioate (e.g., SP-enriched phosphorothioate covalently bonded to the 21^{st} nucleoside (e.g., the 3′-carbon atom of the 21^{st} nucleoside) and the 22^{nd} nucleoside (e.g., the 5′-carbon atom of the 22^{nd} nucleoside) from the 5′-end in an antisense strand can produce superior efficacy and/or duration of action, e.g., as measured by the reduction in the activity of the target relative to a reference guide strand that lacks the combination of a 5′ RP-enriched phosphorothioate and a 3′ SP-enriched phosphorothioate.

[0054] In some aspects, the polynucleotide molecule described herein comprises one or more purine modification. In some specific aspects, the purine modification described herein is 2,6-diaminopurine. In some specific aspects, the purine modification described herein is 3-deaza-adenine. In some specific aspects, the purine modification described herein is 7-deaza-guanine. In some specific aspects, the purine modification described herein is 8-azido-adenine.

[0055] In some aspects, the polynucleotide molecule described herein comprises one or more pyrimidine modification. In some specific aspects, the pyrimidine modification described herein is 2-thio-thymidine. In some specific aspects, the pyrimidine modification described herein is 5-carboxamide-uracil. In some specific aspects, the pyrimidine modification described herein is 5-methyl-cytosine. In some specific aspects, the pyrimidine modification described herein is 5-ethynyl uracil.

[0056] In some embodiment, the polynucleic acid molecule described herein comprises an abasic substitution. In those cases where a hybridized polynucleotide construct is contemplated for use as siRNA, a reduction of miRNA-like off-target effects is desirable. The inclusion of one or more (e.g., one or two) abasic substitutions in the hybridized polynucleotide constructs may reduce or even eliminate miRNA-like off-target effects, as the abasic substitutions lack nucleobases that are capable of engaging in base-pairing interactions and alleviate steric hindrance. Thus, the polynucleotide molecule disclosed herein may include one or more (e.g., one or two) abasic substitutions. In specific aspects, abasic substitution is at the 5^{th} nucleotide from the 5′ end of the antisense strand described herein. In specific aspects, abasic substitution is at the 7^{th} nucleotide from the 5′ end of the antisense strand described herein.

[0057] When the polynucleotide molecule disclosed herein includes two or more of the abasic substitutions, their structures may be same or different. In certain aspects, a sense strand contains one abasic substitution (e.g., an antisense strand may be free of abasic substitutions). In other aspects, an antisense strand contains one abasic substitution (e.g., a sense strand may be free of abasic substitutions). In yet other aspects, an antisense strand contains one abasic substitution, and a sense strand contains one abasic substitution. In further aspects, a sense strand includes an abasic substitution between a nucleoside number (x) and a nucleoside number (x+1), where x is an integer from 2 to 7. In yet further aspects, an antisense strand includes an abasic substitution between a nucleoside number (x) and a nucleoside number (x+1), where x is an integer from 2 to 7.

[0058] The abasic substitution may be of formula (III):

[chemical structure]

[0059] where
[0060] L is a sugar analogue, or is substituted with a heteroacyl from A, U, C, G, or is any other substituted nucleic acid (e.g., locked or unlocked nucleic acid, glycol nucleic acid, etc.;
[0061] each X⁴ is independently O or S;
[0062] each X⁵ is independently O, S, NH, or a bond;
[0063] each R⁹ is independently H, optionally substituted C₁₋₆ alkyl, optionally substituted C₂₋₆ alkenyl, optionally substituted C₂₋₆ alkynyl, optionally substituted (C₁₋₉ heterocyclyl)-C₁₋₆-alkyl, optionally substituted (C₆₋₁₀ aryl)-C₁₋₆-alkyl, optionally substituted (C₃₋₈ cycloalkyl)-C₁₋₆-alkyl, -LinkA(-T)ₚ, or a conjugation moiety;
[0064] each LinkA is independently a multivalent linker (e.g., including —C(O)—N(H)—);
[0065] each T is independently an auxiliary moiety;
[0066] R¹⁰ is a bond to a 3′-carbon atom of a nucleoside (x) in the strand;
[0067] R¹¹ is a bond to a 5′-oxygen atom of a nucleoside (x+1) in the strand;
[0068] p is an integer from 1 to 6; and
[0069] t is an integer from 1 to 6.

[0070] In some aspects, the abasic substitution described herein is attached to the antisense strand of the polynucleic acid molecule described herein. In particular aspects, an abasic substitution (e.g., an internucleotide, abasic spacer of formula (III) in which t is 1) may be included in the antisense strand described herein (e.g., within the seed region of the guide strand). In some aspects, an abasic substitution (e.g., an internucleotide, abasic spacer of formula (III) in which t is 1) may be bonded to the 3′ carbon atom of the second, third, fourth, or fifth nucleoside from the 5′-end of the antisense strand described herein. In certain aspects, an abasic substitution (e.g., an internucleotide, abasic spacer of formula (III) in which t is 1) may be bonded to the 3′ carbon atom of the thirteenth, fourteenth, fifteenth, or sixteenth nucleoside from the 5′-end of the antisense strand described herein. In some aspects, an abasic substitution fourth, fifth, sixth, seventh, eighth, and/or ninth nucleoside from the 5′-end of the antisense strand described herein.

[0071] The polynucleotide molecule described herein may contain a strand including a seed region including a hypoxanthine nucleobase-containing nucleoside (e.g., inosine).

[0072] In certain aspects, the hypoxanthine nucleobase-containing nucleoside is a second nucleoside from the 5′-end in the strand. In further aspects, the hypoxanthine nucleobase-containing nucleoside is a third nucleoside from the 5′-end in the strand. In yet further aspects, the hypoxanthine nucleobase-containing nucleoside is a fourth nucleoside from the 5′-end in the strand. In still further aspects, the hypoxanthine nucleobase-containing nucleoside is a fifth nucleoside from the 5′-end in the strand. In particular aspects, the hypoxanthine nucleobase-containing nucleoside is a sixth nucleoside in the strand. In particular aspects, the hypoxanthine nucleobase-containing nucleoside is a seventh nucleoside in the strand.

### The Amount and Location of Modifications

[0073] In some aspects, the polynucleotide molecule described herein comprises one or more type of modifications as described above. Accordingly, in some aspects, about 10% of the nucleotides from the polynucleotide molecule described herein are modified with one or more type of modifications as described above. In other aspects, about 20% of the nucleotides from the polynucleotide molecule described herein are modified with one or more type of modifications as described above. In other aspects, about 30% of the nucleotides from the polynucleotide molecule described herein are modified with one or more type of modifications as described above. In other aspects, about 40% of the nucleotides from the polynucleotide molecule described herein are modified with one or more type of modifications as described above. In other aspects, about 50% of the nucleotides from the polynucleotide molecule described herein are modified with one or more type of modifications as described above. In other aspects, about 60% of the nucleotides from the polynucleotide molecule described herein are modified with one or more type of modifications as described above. In other aspects, about 70% of the nucleotides from the polynucleotide molecule described herein are modified with one or more type of modifications as described above. In other aspects, about 80% of the nucleotides from the polynucleotide molecule described herein are modified with one or more type of modifications as described above. In other aspects, about 90% of the nucleotides from the polynucleotide molecule described herein are modified with one or more type of modifications as described above. In other aspects, 100% of the nucleotides from the polynucleotide molecule described herein are modified with one or more type of modifications as described above.

[0074] In some aspects, the one or more types of modifications described herein occurs at different positions within the polynucleotide molecule described herein. In specific aspects, the one or more types of modifications described herein occurs in the seed region within the polynucleotide molecule described herein. In specific aspects, the one or more types of modifications described herein occurs at 3′ terminal of the polynucleotide molecule described herein. In specific aspects, the one or more types of modifications described herein occurs at 5′ terminal of the polynucleotide molecule described herein. In specific aspects, the one or more types of modifications described herein occurs dispersedly within the polynucleotide molecule described herein. In specific aspects, the one or more types of modifications described herein occurs in clusters within the polynucleotide molecule described herein.

### Specific Modification Patterns

[0075] In some aspects, described herein is a specific modification pattern for the polynucleic acid molecule which is a double-stranded nucleic acid molecule comprising a sense stand and an antisense strand, wherein the sense strand comprises about twelve 2′-fluoro modified nucleotides and about nine 2′-O-methyl modified nucleotides, and wherein the antisense strand comprises about nine 2′-fluoro modified nucleotides and about fourteen 2′-O-methyl modified nucleotides.

[0076] In some aspects, described herein is a specific modification pattern, wherein the sense strand is fully modified and comprises twelve 2′-fluoro modified nucleotides, nine 2′-O-methyl modified nucleotides, and wherein the antisense strand is fully modified and comprises nine 2′-fluoro modified nucleotides and fourteen 2′-O-methyl modified nucleotides.

[0077] In some aspects, described herein is a specific modification pattern, wherein the sense strand comprises ‘5-NfnNfnNfnNfnNfNfNfnNfnNfnNfnNfnNf-3’, wherein the antisense strand comprises ‘5-nNfnNfnNfnNfnNfnnnNfnNfnNfnNfnnn-3’, wherein “Nf” stands for a 2′-fluoro modified nucleotide, and wherein “n” stands for a 2′-O-methyl modified nucleotide.

[0078] In some aspects, described herein is a specific modification pattern, wherein the sense strand comprises ‘5-NfnNfnNfnNfnNfNfNfnNfnNfnNfnNfnNf-3’, wherein the antisense strand comprises ‘5-nNfnNfnNfnNfnNfnnnNfnNfnNfnNfnnn-3’, wherein the sense and/or antisense strand comprises one or more phosphorothioate linkage, wherein “Nf” stands for a 2′-fluoro modified nucleotide, and wherein “n” stands for a 2′-O-methyl modified nucleotide. In other aspects, described herein is a specific modification pattern, wherein the sense strand comprises ‘5-NfnNfnNfnNfnNfNfNfnNfnNfnNfnNfnNf-3’, wherein the antisense strand comprises ‘5-nNfnNfnNfnNfnNfnnnNfnNfnNfnNfnnn-3’, wherein the sense comprises two phosphorothioate linkages, wherein the antisense comprises four phosphorothioate linkages, wherein “Nf” stands for a 2′-fluoro modified nucleotide, and wherein “n” stands for a 2′-O-methyl modified nucleotide.

[0079] In some aspects, described herein is a specific modification pattern, wherein the sense strand and/or antisense strand is modified as Type I in Table 4.

TABLE 4
Various Modification Patterns

| Pattern Name | Pattern |
|---|---|
| Type I for sense strand | ‘5- NfsnsNfnNfnNfnNfNfNfnNfnNfnNfnNfnNf-3’ |
| Type I for antisense strand | ‘5-nsNfsnNfnNfnNfnNfnnnNfnNfnNfnNfnsnsn-3’ |
| Type II for sense strand | ‘5-nsnsnnnnNfnNfNfNfnnnnnnnnnn -3’ |
| Type II for antisense strand | ‘5-nsNfsnnnNfnNfNfnnnnNfnNfnnnnnsnsn -3’ |
| Type III for sense strand | ‘5-nsnsnnnnnnNfnNfnnnnnnnnnn -3’ |
| Type III for antisense strand | ‘5-nsNfsnnnnnnnnnNfnNfnnnnnnnsnsn -3’ |
| Type IV for sense strand | ‘5-nsnsnnnnNfnNfnNfnnnnnnnnnn -3’ |
| Type IV for antisense strand | ‘5-nsNfsnnnnnnnnnNfnNfnNfnnnnnsnsn -3’ |

Note:
“Nf” stands for a 2′-fluoro modified nucleotide, “n” stands for a 2′-O-methyl modified nucleotide, “s” stands for a 3′-phosphorothioate.

[0080] In some aspects, the polynucleotide molecule provided herein comprises a sense strand from one of SEQ ID NOs: 1, 3, 5, 7, 9, 25-127, and 437-539 and an antisense strand comprises one of SEQ ID NOs: 2, 4, 6, 8, 10, and 231-333. In other aspects, the polynucleotide molecule provided herein comprises a sense strand from one of SEQ ID NOs: 1, 3, 5, 7, 9, 25-127, and 437-539, an antisense strand comprises one of SEQ ID NOs: 2, 4, 6, 8, 10, and 231-333, and wherein the sense and/or antisense strand is modified in Type I modification pattern specified in Table 4. In some aspects, the polynucleotide molecule provided herein comprises a sense strand from one of SEQ ID NOs: 1, 3, 5, 7, and 9 and an antisense strand comprises one of SEQ ID NOs: 2, 4, 6, 8, and 10. In other aspects, the polynucleotide molecule provided herein comprises a sense strand from one of SEQ ID NOs: 1, 3, 5, 7, and 9, an antisense strand comprises one of SEQ ID NOs: 2, 4, 6, 8, and 10, and wherein the sense and/or antisense strand is modified in Type I modification pattern specified in Table 4.

[0081] In some aspects, described herein is a specific modification pattern, wherein the sense strand comprises about four 2′-fluoro modified nucleotides and about seventeen 2′-O-methyl modified nucleotides, and wherein the antisense strand comprises about six 2′-fluoro modified nucleotides and about seventeen 2′-O-methyl modified nucleotides.

[0082] In some aspects, described herein is a specific modification pattern, wherein the sense strand comprises four 2′-fluoro modified nucleotides, seventeen 2′-O-methyl modified nucleotides, and no other nucleotides, and wherein the antisense strand comprises six 2′-fluoro modified nucleotides and seventeen 2′-O-methyl modified nucleotides and no other nucleotides.

[0083] In some aspects, described herein is a specific modification pattern, wherein the sense strand comprises ‘5-nnnnnnNfnNfNfNfnnnnnnnnnn-3’, wherein the antisense strand comprises ‘5-nNfnnnNfnNfNfnnnnNfnNfnnnnnnn-3’, wherein “Nf” stands for a 2′-fluoro modified nucleotide, and wherein “n” stands for a 2′-O-methyl modified nucleotide.

[0084] In some aspects, described herein is a specific modification pattern, wherein the sense strand comprises ‘5-nnnnnnNfnNfNfNfnnnnnnnnnn-3’, wherein the antisense strand comprises ‘5-nNfnnnNfnNfNfnnnnNfnNfnnnnnnn-3’, wherein the sense and/or antisense strand comprises one or more phosphorothioate linkage, wherein “Nf” stands for a 2′-fluoro modified nucleotide, and wherein “n” stands for a 2′-O-methyl modified nucleotide. In other aspects, described herein is a specific modification pattern, wherein the sense strand comprises ‘5-nnnnnnNfnNfNfNfnnnnnnnnn-3’, wherein the antisense strand comprises ‘5-nNfnnnNfnNfNfnnnnNfnNfnnnnnnn-3’, wherein the sense comprises two phosphorothioate linkages, wherein the antisense comprises four phosphorothioate linkages, wherein “Nf” stands for a 2′-fluoro modified nucleotide, and wherein “n” stands for a 2′-O-methyl modified nucleotide.

[0085] In some aspects, described herein is a specific modification pattern, wherein the sense strand and/or antisense strand is modified as Type II in Table 4.

[0086] In some aspects, the polynucleotide molecule provided herein comprises a sense strand comprising one of SEQ ID NOs: 1, 3, 5, 7, 9, 25-127, and 437-539, and/or an antisense strand comprising one of SEQ ID NOs: 2, 4, 6, 8, 10, and 231-333, and wherein the sense and/or antisense strand is modified in Type II modification pattern specified in Table 4. In other aspects, the polynucleotide molecule provided herein comprises a sense strand comprising one of SEQ ID NOs: 1, 3, 5, 7, and 9, and/or an antisense strand comprising one of SEQ ID NOs: 2, 4, 6, 8, and 10, and wherein the sense and/or antisense strand is modified in Type II modification pattern specified in Table 4.

[0087] In some aspects, described herein is a specific modification pattern, wherein the sense strand comprises about two 2′-fluoro modified nucleotides and about nineteen 2′-O-methyl modified nucleotides, and wherein the antisense strand comprises about three 2′-fluoro modified nucleotides and about twenty 2′-O-methyl modified nucleotides.

[0088] In some aspects, described herein is a specific modification pattern, wherein the sense strand comprises two 2′-fluoro modified nucleotides, nineteen 2′-O-methyl modified nucleotides, and no other nucleotides, and wherein the antisense strand comprises three 2′-fluoro modified nucleotides and twenty 2′-O-methyl modified nucleotides and no other nucleotides.

[0089] In some aspects, described herein is a specific modification pattern, wherein the sense strand comprises ‘5-nnnnnnnnNfnNfnnnnnnnnnn-3’, wherein the antisense strand comprises ‘5-nNfnnnnnnnnnNfnNfnnnnnnnnn-3’, wherein “Nf” stands for a 2′-fluoro modified nucleotide, and wherein “n” stands for a 2′-O-methyl modified nucleotide.

[0090] In some aspects, described herein is a specific modification pattern, wherein the sense strand comprises ‘5-nnnnnnnnNfnNfnnnnnnnnnn-3’, wherein the antisense strand comprises ‘5-nNfnnnnnnnnnNfnNfnnnnnnnnn-3’, wherein the sense and/or antisense strand comprises one or more phosphorothioate linkage, wherein “Nf” stands for a 2′-fluoro modified nucleotide, and wherein “n” stands for a 2′-O-methyl modified nucleotide. In other aspects, described herein is a specific modification pattern, wherein the sense strand comprises ‘5-nnnnnnnnNfnNfnnnnnnnnnn-3’, wherein the antisense strand comprises ‘5-nNfnnnnnnnnnNfnNfnnnnnnnnn-3’, wherein the sense comprises two phosphorothioate linkages, wherein the antisense comprises four phosphorothioate linkages, wherein “Nf” stands for a 2′-fluoro modified nucleotide, and wherein “n” stands for a 2′-O-methyl modified nucleotide.

[0091] In some aspects, described herein is a specific modification pattern, wherein the sense strand and/or antisense strand is modified as Type III in Table 4.

[0092] In some aspects, the polynucleotide molecule provided herein comprises a sense strand from one of SEQ ID NOs: 1, 3, 5, 7, 9, 25-127, and 437-539, an antisense strand comprises one of SEQ ID NOs: 2, 4, 6, 8, 10, and 231-333, and wherein the sense and/or antisense strand is modified in Type III modification pattern specified in Table 4. In other aspects, the polynucleotide molecule provided herein comprises a sense strand from one of SEQ ID NOs: 1, 3, 5, 7, and 9, an antisense strand comprises one of SEQ ID NOs: 2, 4, 6, 8, and 10, and wherein the sense and/or antisense strand is modified in Type III modification pattern specified in Table 4.

[0093] In some aspects, described herein is a specific modification pattern, wherein the sense strand comprises about three 2′-fluoro modified nucleotides and about eighteen 2′-O-methyl modified nucleotides, and wherein the antisense strand comprises about four 2′-fluoro modified nucleotides and about nineteen 2′-O-methyl modified nucleotides.

[0094] In some aspects, described herein is a specific modification pattern, wherein the sense strand comprises three 2′-fluoro modified nucleotides, eighteen 2′-O-methyl modified nucleotides, and no other nucleotides, and wherein the antisense strand comprises four 2′-fluoro modified nucleotides and nineteen 2′-O-methyl modified nucleotides and no other nucleotides.

[0095] In some aspects, described herein is a specific modification pattern, wherein the sense strand comprises ‘5-nnnnnnNfnNfnNfnnnnnnnnnn-3’, wherein the antisense strand comprises ‘5-nNfnnnnnnnnnNfnNfnNfnnnnnnn-3’, wherein “Nf” stands for a 2′-fluoro modified nucleotide, and wherein “n” stands for a 2′-O-methyl modified nucleotide.

[0096] In some aspects, described herein is a specific modification pattern, wherein the sense strand comprises ‘5-nnnnnnNfnNfnNfnnnnnnnnnn-3’, wherein the antisense strand comprises ‘5-nNfnnnnnnnnnNfnNfnNfnnnnnnn-3’, wherein the sense and/or antisense strand comprises one or more phosphorothioate linkage, wherein “Nf” stands for a 2′-fluoro modified nucleotide, and wherein “n” stands for a 2′-O-methyl modified nucleotide. In other aspects, described herein is a specific modification pattern, wherein the sense strand comprises ‘5-nnnnnnNfnNfnNfnnnnnnnnnn-3’, wherein the antisense strand comprises ‘5-nNfnnnnnnnnnNfnNfnNfnnnnnnn-3’, wherein the sense comprises two phosphorothioate linkages, wherein the antisense comprises four phosphorothioate linkages, wherein “Nf” stands for a 2′-fluoro modified nucleotide, and wherein “n” stands for a 2′-O-methyl modified nucleotide.

[0097] In some aspects, described herein is a specific modification pattern, wherein the sense strand and/or antisense strand is modified as Type IV in Table 4.

[0098] In some aspects, the polynucleotide molecule provided herein comprises a sense strand comprising one of SEQ ID NOs: 1, 3, 5, 7, 9, 25-127, and 437-539, and/or an antisense strand comprising one of SEQ ID NOs: 2, 4, 6, 8, 10, and 231-333, and wherein the sense and/or antisense strand is modified in Type IV modification pattern specified in Table 4. In other aspects, the polynucleotide molecule provided herein comprises a sense strand comprising one of SEQ ID NOs: 1, 3, 5, 7, and 9, and/or an antisense strand comprising one of SEQ ID NOs: 2, 4, 6, 8, and 10, and wherein the sense and/or antisense strand is modified in Type IV modification pattern specified in Table 4.

[0099] A polynucleic acid molecule for modulating expression of PCSK9 gene, wherein polynucleic acid molecule comprises an antisense strand comprising the nucleotide sequence of usUfsacaaaagcaAfaAfcAfggucusasg (SEQ ID NO: 14) and a sense strand comprising the nucleotide sequence of asgsaccuGfuUfuUfgcuuuuguaa (SEQ ID NO: 13), wherein “Nf” stands for a 2′-fluoro modified nucleotide, “n” stands for a 2′-O-methyl modified nucleotide, and “s” refers to 3′-phosphorothioate.

[0100] A polynucleic acid molecule for modulating expression of PCSK9 gene, wherein polynucleic acid molecule comprises an antisense strand comprising the nucleotide sequence of usUfsucaaguuacAfaAfaGfcaaaascsa (SEQ ID NO: 16) and a sense strand comprising the nucleotide sequence of ususuugcUfuUfuGfuaacuugaaa (SEQ ID NO: 15), wherein “Nf” stands for a 2′-fluoro modified nucleotide, “n” stands for a 2′-O-methyl modified nucleotide, and “s” refers to 3′-phosphorothioate.

[0101] A polynucleic acid molecule for modulating expression of PCSK9 gene, wherein polynucleic acid molecule comprises an antisense strand comprising the nucleotide sequence of asAfsuaucuucaaGfuUfaCfaaaagscsa (SEQ ID NO: 18) and a sense strand comprising the nucleotide sequence of csusuuugUfaAfcUfugaagauauu (SEQ ID NO: 17), wherein “Nf” stands for a 2′-fluoro modified nucleotide, “n” stands for a 2′-O-methyl modified nucleotide, and “s” refers to 3′-phosphorothioate.

[0102] A polynucleic acid molecule for modulating expression of PCSK9 gene, wherein polynucleic acid molecule comprises an antisense strand comprising the nucleotide sequence of asUfsuaauaaaaaUfgCfuAfcaaaascsc (SEQ ID NO: 20) and a sense strand comprising the nucleotide sequence of ususuuguAfgCfaUfuuuuauuaau (SEQ ID NO: 19), wherein “Nf” stands for a 2′-fluoro modified nucleotide, “n” stands for a 2′-O-methyl modified nucleotide, and “s” refers to 3′-phosphorothioate.

[0103] A polynucleic acid molecule for modulating expression of PCSK9 gene, wherein polynucleic acid molecule comprises an antisense strand comprising the nucleotide sequence of asUfsauuaauaaaAfaUfgCfuacaasasa (SEQ ID NO: 22) and a sense strand comprising the nucleotide sequence of ususguagCfaUfuUfuuauuaauau (SEQ ID NO: 21), wherein “Nf” stands for a 2′-fluoro modified nucleotide, “n” stands for a 2′-O-methyl modified nucleotide, and “s” refers to 3′-phosphorothioate.

### Conjugation

### Binding Moiety

[0104] In certain aspects, the polynucleotide molecule described herein is coupled or conjugated with one or more targeting moieties to form a polynucleotide-targeting moiety conjugate molecule. In some instances, a targeting moiety is selected based on its ability to target the conjugate molecule described herein to a desired cell population, tissue, or an organ selectively or preferably. In some instances, the targeting moiety targets the cell, tissue, or an organ that expresses the corresponding binding partner (e.g., either the corresponding receptor or ligand) of the targeting moiety. For example, the polynucleotide molecule described herein could be targeted to hepatocytes expressing asialoglycoprotein (ASGP-R) by selecting a targeting moiety containing N-acetyl galactosamine (GalNAc) as the targeting moiety. A targeting moiety (i.e., an intracellular targeting moiety) that targets a desired site within the cell (e.g., endoplasmic reticulum, Golgi apparatus, nucleus, or mitochondria) may be included in the hybridized polynucleotide constructs disclosed herein. Non-limiting examples of the intracellular targeting moieties are provided in WO 2015/069932 and in WO 2015/188197; the disclosure of the intracellular targeting moieties in WO 2015/069932 and in WO 2015/188197 is incorporated herein by reference.

[0105] The polynucleotide molecule described herein, thus, may include one or more targeting moieties selected from the group consisting of intracellular targeting moieties, extracellular targeting moieties, and combinations thereof. Thus, the inclusion of one or more targeting moieties (e.g., extracellular targeting moieties including targeting moieties independently selected from the group consisting of folate, mannose, N-acetyl galactosamine, and prostate specific membrane antigen) and one or more intracellular targeting moiety (e.g., a moiety targeting endoplasmic reticulum, Golgi apparatus, nucleus, or mitochondria) in the polynucleotide molecule described herein can facilitate the delivery of the polynucleotides to a specific site within the specific cell population. In some aspects, the targeting moiety contains one or more mannose carbohydrates. Mannose targets the mannose receptor, which is a 175 KDa membrane-associated receptor that is expressed on sinusoidal liver cells and antigen presenting cells (e.g., macrophages and dendritic cells). It is a highly effective endocytotic/recycling receptor that binds and internalizes mannosylated pathogens and proteins (Lennartz et. al. J. Biol. Chem. 262:9942-9944, 1987; Taylor et. al. J. Biol. Chem. 265:12156-62, 1990).

[0106] Some of the targeting moieties are described herein. In some aspects, the targeting moiety contains or specifically binds to a protein selected from the group including insulin, insulin-like growth factor receptor 1 (IGF1R), IGF2R, insulin-like growth factor (IGF; e.g., IGF 1 or 2), mesenchymal epithelial transition factor receptor (c-met; also known as hepatocyte growth factor receptor (HGFR)), hepatocyte growth factor (HGF), epidermal growth factor receptor (EGFR), epidermal growth factor (EGF), heregulin, fibroblast growth factor receptor (FGFR), platelet-derived growth factor receptor (PDGFR), platelet-derived growth factor (PDGF), vascular endothelial growth factor receptor (VEGFR), vascular endothelial growth factor (VEGF), tumor necrosis factor receptor (TNFR), tumor necrosis factor alpha (TNF-α), TNF-β, folate receptor (FOLR), folate, transferrin, transferrin receptor (TfR), mesothelin, Fc receptor, c-kit receptor, c-kit, an integrin (e.g., an α4 integrin or a β-1 integrin), P-selectin, sphingosine-1-phosphate receptor-1 (SlPR), hyaluronate receptor, leukocyte function antigen-1 (LFA-1), CD4, CD11, CD18, CD20, CD25, CD27, CD52, CD70, CD80, CD85, CD95 (Fas receptor), CD106 (vascular cell adhesion molecule 1 (VCAM1), CD166 (activated leukocyte cell adhesion molecule (ALCAM)), CD178 (Fas ligand), CD253 (TNF-related apoptosis-inducing ligand (TRAIL)), ICOS ligand, CCR2, CXCR3, CCR5, CXCL12 (stromal cell-derived factor 1 (SDF-1)), interleukin 1 (IL-1), IL-Ira, IL-2, IL-3, IL-4, IL-6, IL-7, IL-8, CTLA-4, MART-1, gp100, MAGE-1, ephrin (Eph) receptor, mucosal addressin cell adhesion molecule 1 (MAdCAM-1), carcinoembryonic antigen (CEA), LewisY, MUC-1, epithelial cell adhesion molecule (EpCAM), cancer antigen 125 (CA125), prostate specific membrane antigen (PSMA), TAG-72 antigen, and fragments thereof. In further aspects, the targeting moiety contains erythroblastic leukemia viral oncogene homolog (ErbB) receptor (e.g., ErbB1 receptor; ErbB2 receptor; ErbB3 receptor; and ErbB4 receptor). In some aspects, the targeting moiety contains one or more (e.g., from 1 to 6) N-acetyl galactosamines (GalNAc). In certain aspects, the targeting moiety contains one or more (e.g., from 1 to 6) mannoses. In other aspects, the targeting moiety contains a folate ligand. The folate ligand has the structure:

[chemical structure]

[0107] Certain targeting moieties may include bombesin, gastrin, gastrin-releasing peptide, tumor growth factors (TGF) (e.g., TGF-α or TGF-β), or vaccinia virus growth factor (VVGF). Non-peptidyl targeting moieties can also be used in the targeting moieties and may include, for example, steroids, carbohydrates, vitamins, and lectins. Some targeting moieties may include a polypeptide, such as somatostatin or somatostatin analog (e.g., octreotide or lanreotide), bombesin, or an antibody or antigen-binding fragment thereof. Antibodies may be of any recognized class or subclass, e.g., IgG, IgA, IgM, IgD, or IgE. Typical are those antibodies which fall within the IgG class. The antibodies can be derived from any species according techniques known in the art. Typically, however, the antibody is of human, murine, or rabbit origin. In addition, the antibody may be polyclonal or monoclonal, but is typically monoclonal. Human or chimeric (e.g., humanized) antibodies may be used in targeting moieties. Targeting moieties may include an antigen-binding fragment of an antibody. Such antibody fragments may include, for example, the Fab′, F(ab′)2, Fv, or Fab fragments, single domain antibody, ScFv, or other antigen-binding fragments. Fc fragments may also be employed in targeting moieties. Such antibody fragments can be prepared, for example, by proteolytic enzyme digestion, for example, by pepsin or papain digestion, reductive alkylation, or recombinant techniques. The materials and methods for preparing antibody fragments are well-known to those skilled in the art. See, e.g., Parham, J. Immunology, 131:2895, 1983; Lamoyi et al., J. Immunological Methods, 56:235, 1983.

[0108] Other peptides for use as a targeting auxiliary moiety in polynucleotide molecule described herein can be selected from KiSS peptides and analogs, urotensin II peptides and analogs, GnRH I and II peptides and analogs, depreotide, vapreotide, vasoactive intestinal peptide (VIP), cholecystokinin (CCK), RGD-containing peptides, melanocyte-stimulating hormone (MSH) peptide, neurotensin, calcitonin, glutathione, YIGSR (leukocyte-avid peptides, e.g., P483H, which contains the heparin-binding region of platelet factor-4 (PF-4) and a lysine-rich sequence), atrial natriuretic peptide (ANP), β-amyloid peptides, delta-opioid antagonists (such as ITIPP(psi)), annexin-V, endothelin, leukotriene B4 (LTB4), chemotactic peptides (e.g., N-formyl-methionyl-leucyl-phenylalanine-lysine (fMLFK), GP IIb/IIIa receptor antagonists (e.g., DMP444), human neutrophil elastase inhibitor (EPI-HNE-2 and EPI-HNE-4), plasmin inhibitor, antimicrobial peptides, apticide (P280 and P274), thrombospondin receptor (including analogs such as TP-1300), bitistatin, pituitary adenylyl cyclase type I receptor (PAC1), fibrin α-chain, peptides derived from phage display libraries, and conservative substitutions thereof.

[0109] One or more (e.g., from 1 to 6) targeting moieties can be linked to MOIETY or to X2 in formula (V′, V″, or V′″) through -LinkA-.

[0110] In some aspects, the targeting moiety includes one or more (e.g., from 1 to 6 or from 1 to 3) asialoglycoprotein receptor ligands (e.g., GalNAc). In some aspects, an asialoglycoprotein receptor ligand (e.g., GalNAc) ligand is attached to -LinkA- through an anomeric carbon (e.g., where the anomeric carbon is the carbon atom in an acetal or a hemiaminal). In some aspects, an asialoglycoprotein receptor ligand (e.g., GalNAc) comprises an anomeric carbon bonded to trivalent, tetravalent linker, pentavalent, or hexavalent linker, wherein the anomeric carbon is part of a hemiaminal group. An asialoglycoprotein receptor ligand (e.g., GalNAc) attached to a linker through a hemiaminal may produce a hybridized polynucleotide construct having superior efficacy in gene silencing as compared to hybridized polynucleotide constructs having the asialoglycoprotein receptor ligand (e.g., GalNAc) attached to a linker through an acetal.

[0111] In some aspects, the linker and three asialoglycoprotein receptor targeting moieties, each of which comprises GalNAc, are as shown in Formula (V). In some instances, the conjugate described herein only comprises one asialoglycoprotein receptor targeting moiety, so the conjugate comprises a structure of Formula (V) with any two of the targeting moieties removed. In some instances, the conjugate described herein only comprises two asialoglycoprotein receptor targeting moieties, so the conjugate described herein comprises a structure of Formula (V) with any one of the targeting moieties removed.

[chemical structure]

wherein one of Y1 and Y2 is nucleotide, or wherein both Y1 and Y2 are nucleotides and Y1 and Y2 are consecutive or neighboring nucleotides from the polynucleic acid molecule described herein.

[0112] In some aspects, the linker and the targeting moieties described herein are conjugated to 3′ end of the sense strand (e.g., as shown in Formula (V′)). In some aspects, the linker and the targeting moieties described herein are conjugated to 5′ end of the sense strand (e.g., as shown in Formula (V″) or (V′″)). In some aspects, the linker and the targeting moieties described herein are conjugated to 3′ end of the antisense strand (e.g., as shown in Formula (V′)). In some aspects, the linker and the targeting moieties described herein are conjugated to 5′ end of the antisense strand (e.g., as shown in Formula (V″) or (V′″)).

[chemical structure]

wherein Z in formula (V′) corresponds to one of the sugar modifications described herein (e.g., —H, —OH, —O-Methyl, —F, or —O-methoxyethyl), and R in formula (V′) is adenine, uracil, guanine, cytosine, thymine, abasic, or others.

[chemical structure]

wherein Z in formula (V″) is a moiety that corresponds to one of the sugar modifications described herein (e.g., —H, —OH, —O-Methyl, —F, or —O-methoxyethyl) and R in formula (V″) is adenine, uracil, guanine, cytosine, thymine, abasic, or others.

[chemical structure]

wherein Z in formula (V′″) is a moiety that corresponds to one of the sugar modifications described herein (e.g., —H, —OH, —O-Methyl, —F, or —O-methoxyethyl) and R in formula (V′″) is adenine, uracil, guanine, cytosine, thymine, abasic, or others.

[0113] In some instances, the 3′ end of passenger/sense strand from Table 1, Table 2, or Table 3 is conjugated with X2-GalNAc (see Formula (V) or (V′)). In some instances, the 5′ end of passenger/sense strand from Table 1, Table 2, or Table 3 is conjugated with X2-GalNAc (see Formula (V), (V″), or (V′″)). In some instances, a nucleic acid within passenger/sense strand (not at the 5′ or 3′ end) from Table 1, Table 2, or Table 3 is conjugated with X2-GalNAc (see Formula (V)). In some instances, the 3′ end of guide/antisense strand from Table 1, Table 2, or Table 3 is conjugated with X2-GalNAc (see Formula (V) or (V′)). In some instances, the 5′ end of guide/antisense strand from Table 1, Table 2, or Table 3 is conjugated with X2-GalNAc (see Formula (V), (V″), or (V′″)). In some instances, a nucleic acid within guide/antisense strand (not at the 5′ or 3′ end) from Table 1, Table 2, or Table 3 is conjugated with X2-GalNAc (see Formula (V)).

[0114] One or more endosomal escape moieties (e.g., from 1 to 6 or from 1 to 3) can be attached to a polynucleotide construct or a hybridized polynucleotide construct disclosed herein as an auxiliary moiety. Exemplary endosomal escape moieties include chemotherapeutics (e.g., quinolones such as chloroquine); fusogenic lipids (e.g., dioleoylphosphatidyl-ethanolamine (DOPE)); and polymers such as polyethylenimine (PEI); poly(beta-amino ester)s; polypeptides, such as polyarginines (e.g., octaarginine) and polylysines (e.g., octalysine); proton sponges, viral capsids, and peptide transduction domains as described herein. For example, fusogenic peptides can be derived from the M2 protein of influenza A viruses; peptide analogs of the influenza virus hemagglutinin; the HEF protein of the influenza C virus; the transmembrane glycoprotein of filoviruses; the transmembrane glycoprotein of the rabies virus; the transmembrane glycoprotein (G) of the vesicular stomatitis virus; the fusion protein of the Sendai virus; the transmembrane glycoprotein of the Semliki forest virus; the fusion protein of the human respiratory syncytial virus (RSV); the fusion protein of the measles virus; the fusion protein of the Newcastle disease virus; the fusion protein of the visna virus; the fusion protein of murine leukemia virus; the fusion protein of the HTL virus; and the fusion protein of the simian immunodeficiency virus (SIV). Other moieties that can be employed to facilitate endosomal escape are described in Dominska et al., Journal of Cell Science, 123(8):1183-1189, 2010. Specific examples of endosomal escape moieties including moieties suitable for conjugation to the hybridized polynucleotide constructs disclosed herein are provided, e.g., in WO 2015/188197; the disclosure of these endosomal escape moieties is incorporated by reference herein.

[0115] One or more endosomal escape moieties (e.g., from 1 to 6 or from 1 to 3) can be attached to a MOIETY or X2 in formula (V′, V″, or V′″) through -LinkA-, as described herein.

[0116] One or more cell penetrating peptides (CPP) (e.g., from 1 to 6 or from 1 to 3) can be attached to a polynucleotide construct or a hybridized polynucleotide construct disclosed herein as an auxiliary moiety. The CPP can be linked to the hybridized polynucleotide bioreversibly through a disulfide linkage, as disclosed herein. Thus, upon delivery to a cell, the CPP can be cleaved intracellularly, e.g., by an intracellular enzyme (e.g., protein disulfide isomerase, thioredoxin, or a thioesterase) and thereby release the polynucleotide.

[0117] CPPs are known in the art (e.g., TAT or Arg8) (Snyder and Dowdy, 2005, Expert Opin. Drug Deliv. 2, 43-51). Specific examples of CPPs including moieties suitable for conjugation to the hybridized polynucleotide constructs disclosed herein are provided, e.g., in WO 2015/188197; the disclosure of these CPPs is incorporated by reference herein.

[0118] CPPs are positively charged peptides that are capable of facilitating the delivery of biological cargo to a cell. It is believed that the cationic charge of the CPPs is essential for their function. Moreover, the transduction of these proteins does not appear to be affected by cell type, and these proteins can efficiently transduce nearly all cells in culture with no apparent toxicity (Nagahara et al., Nat. Med. 4:1449-52, 1998). In addition to full-length proteins, CPPs have also been used successfully to induce the intracellular uptake of DNA (Abu-Amer, supra), antisense polynucleotides (Astriab-Fisher et al., Pharm. Res, 19:744-54, 2002), small molecules (Polyakov et al., Bioconjug. Chem. 11:762-71, 2000) and even inorganic 40 nm iron particles (Dodd et al., J. Immunol. Methods 256:89-105, 2001; Wunderbaldinger et al., Bioconjug. Chem. 13:264-8, 2002; Lewin et al., Nat. Biotechnol. 18:410-4, 2000; Josephson et al., Bioconjug. Chem. 10:186-91, 1999) suggesting that there is considerable flexibility in particle size in this process.

[0119] In one embodiment, a CPP useful in the methods and compositions as described herein includes a peptide featuring substantial alpha-helicity. It has been discovered that transfection is optimized when the CPP exhibits significant alpha-helicity. In another embodiment, the CPP includes a sequence containing basic amino acid residues that are substantially aligned along at least one face of the peptide. A CPP described herein may be a naturally occurring peptide or a synthetic peptide.

[0120] One or more cell penetrating peptides (e.g., from 1 to 6 or from 1 to 3) can be attached to a MOIETY or X2 in formula (V′, V″, or V′″) through -LinkA-, as described herein.

[0121] The polynucleotide constructs and the hybridized polynucleotide constructs disclosed herein can also include covalently attached neutral polymer-based auxiliary moieties. Neutral polymers include poly(C1-6 alkylene oxide), e.g., poly(ethylene glycol) and poly(propylene glycol) and copolymers thereof, e.g., di- and triblock copolymers. Other examples of polymers include esterified poly(acrylic acid), esterified poly(glutamic acid), esterified poly(aspartic acid), poly(vinyl alcohol), poly(ethylene-co-vinyl alcohol), poly(N-vinyl pyrrolidone), poly(ethyloxazoline), poly(alkylacrylates), poly(acrylamide), poly(N-alkylacrylamides), poly(N-acryloylmorpholine), poly(lactic acid), poly(glycolic acid), poly(dioxanone), poly(caprolactone), styrene-maleic acid anhydride copolymer, poly(L-lactide-co-glycolide) copolymer, divinyl ether-maleic anhydride copolymer, N-(2-hydroxypropyl)methacrylamide copolymer (HMPA), polyurethane, N-isopropylacrylamide polymers, and poly(N,N-dialkylacrylamides). Exemplary polymer auxiliary moieties may have molecular weights of less than 100, 300, 500, 1000, or 5000 Da (e.g., greater than 100 Da). Other polymers are known in the art.

[0122] One or more polymers (e.g., from 1 to 6 or from 1 to 3) can be attached to a MOIETY or X2 in formula (V′, V″, or V′″) through -LinkA-, as described herein.

### Conjugation Linkers

[0123] In some aspects, the polynucleic acid molecules described herein comprises a sense or antisense strand bonded to at least one group of formula (I)

[chemical structure]

[0124] or a salt thereof, or a stereoisomer thereof,
[0125] where
[0126] each X¹ is independently O or S;
[0127] each X² is independently O, S, NH, or a bond;
[0128] MOIETY is optionally substituted C₂₋₁₀ alkane-tetrayl or a group -M¹-M²-M³-, wherein each M¹ and each M³ is independently absent or optionally substituted C₁₋₆ alkylene, and M² is optionally substituted C₃₋₉ heterocycle-tetrayl, optionally substituted C₆₋₁₀ arene-tetrayl, or optionally substituted C₃₋₈ cycloalkane-tetrayl;
[0129] each R¹ and each R² is independently H, optionally substituted C₁₋₁₆ alkyl, optionally substituted C₂₋₁₆ heteroalkyl, a conjugation moiety, or -LinkA(-T)ₚ, provided that at least one R¹ or at least one R² is a conjugation moiety or -LinkA(-T)ₚ;
[0130] each R³ is independently H, optionally substituted C₁₋₁₆ alkyl, optionally substituted C₂₋₁₆ heteroalkyl, optionally substituted C₂₋₁₆ alkenyl, optionally substituted C₂₋₁₆ alkynyl, optionally substituted (C₁₋₉ heterocyclyl)-C₁₋₆-alkyl, optionally substituted (C₆₋₁₀ aryl)-C₁₋₆-alkyl, optionally substituted (C₃₋₈ cycloalkyl)-C₁₋₆-alkyl, a conjugation moiety, or -LinkA(-T)ₚ;
[0131] R⁴ is H, optionally substituted C₁₋₆ alkyl, -LinkA(-T)ₚ, or -Sol;
[0132] each LinkA is independently a multivalent linker (e.g., including —C(O)—N(H)— (e.g., at least one multivalent linker including —C(O)—N(H)— bonded to T));
[0133] each T is independently an auxiliary moiety;
[0134] Sol is solid support;
[0135] m is an integer from 1 to 6;
[0136] each n is independently 0 or 1;
[0137] each p is independently an integer from 1 to 6; and
[0138] q is an integer from 0 to 3.

[0139] The at least one group of formula (I) may be bonded to a 5′-terminus, 3′-terminus, internucleoside phosphate, internucleoside phosphorothioate, or internucleoside phosphorodithioate of the polynucleotide. When the at least one group of formula (I) is bonded to the internucleoside phosphate, internucleoside phosphorothioate, or internucleoside phosphorodithioate, q is 0. The polynucleotide construct contains no more than one Sol.

[0140] Group -LinkA- can include from 0 to 3 multivalent monomers (e.g., optionally substituted C1-6 alkane-triyl, optionally substituted C1-6 alkane-tetrayl, or trivalent nitrogen atom) and one or more divalent monomers (e.g., from 1 to 40), where each divalent monomer is independently optionally substituted C1-6 alkylene; optionally substituted C2-6 alkenylene; optionally substituted C2-6 alkynylene; optionally substituted C3-8 cycloalkylene; optionally substituted C3-8 cycloalkenylene; optionally substituted C6-14 arylene; optionally substituted C1-9 heteroarylene having 1 to 4 heteroatoms selected from N, O, and S; optionally substituted C1-9 heterocyclylene having 1 to 4 heteroatoms selected from N, O, and S; imino; optionally substituted N; O; or S(O)m, wherein m is 0, 1, or 2. In some aspects, each monomer is independently optionally substituted C1-6 alkylene; optionally substituted C3-8 cycloalkylene; optionally substituted C3-8 cycloalkenylene; optionally substituted C6-14 arylene; optionally substituted C1-9 heteroarylene having 1 to 4 heteroatoms selected from N, O, and S; optionally substituted C1-9 heterocyclylene having 1 to 4 heteroatoms selected from N, O, and S; imino; optionally substituted N; O; or S(O)m, where m is 0, 1, or 2 (e.g., m is 2). In certain aspects, each monomer is independently optionally substituted C1-6 alkylene; optionally substituted C3-8 cycloalkylene; optionally substituted C3-8 cycloalkenylene; optionally substituted C6-14 arylene; optionally substituted C1-9 heteroarylene having 1 to 4 heteroatoms selected from N, O, and S; optionally substituted C1-9 heterocyclylene having 1 to 4 heteroatoms selected from N, O, and S; optionally substituted N; O; or S(O)m, where m is 0, 1, or 2 (e.g., m is 2). The non-bioreversible linker connecting the auxiliary moiety to the conjugating moiety or to the reaction product thereof can include from 2 to 500 (e.g., from 2 to 300 or from 2 to 200) of such monomers. Group -LinkA- may include a poly(alkylene oxide) (e.g., polyethylene oxide, polypropylene oxide, poly(trimethylene oxide), polybutylene oxide, poly(tetramethylene oxide), and diblock or triblock co-polymers thereof). In some aspects, the non-bioreversible linker includes polyethylene oxide (e.g., poly(ethylene oxide) having a molecular weight of less than 1 kDa).

[0141] Group -LinkA(-T)p in formula (I) may be prepared by a process described in the sections below. In some instances, -LinkA(-T)p is of formula (II):

[chemical structure]

[0142] where
[0143] each s is independently an integer from 0 to 20 (e.g., from 0 to 10), where the repeating units are the same or different;
[0144] Q¹ is a conjugation linker (e.g., [-Q³-Q⁴-Q⁵]ₛ-Q^{C}- where Q^{C} is optionally substituted C₂₋₁₂ heteroalkylene (e.g., a heteroalkylene containing —C(O)—N(H)—, —N(H)—C(O)—, —S(O)₂-N(H)—, or —N(H)—S(O)₂—), optionally substituted C₁₋₁₂ thioheterocyclylene (e.g.,

[chemical structure]

[0145] optionally substituted C₁₋₁₂ heterocyclylene (e.g., 1,2,3-triazole-1,4-diyl or

[chemical structure]

cyclobut-3-ene-1,2-dione-3,4-diyl, or pyrid-2-yl hydrazone);
[0146] Q² is a linear group (e.g., [-Q³-Q⁴-Q]ₛ-), if p is 1, or a branched group (e.g., [-Q³-Q⁴-Q⁵]ₛ-Q⁷([-Q³-Q⁴-Q⁵]ₛ-(Q⁷)ₚ₁)ₚ₂, where p1 is 0 or 1, p2 is 0, 1, 2, or 3), if p is an integer from 2 to 6;
[0147] each Q³ and each Q⁶ is independently absent, —CO—, —NH—, —O—, —S—, —SO₂—, —OC(O)—, —COO—, —NHC(O)—, —C(O)NH—, —CH₂—, —CH₂NH—, —NHCH₂—, —CH₂O—, or —OCH₂—;
[0148] each Q⁴ is independently absent, optionally substituted C₁₋₁₂ alkylene, optionally substituted C₂₋₁₂ alkenylene, optionally substituted C₂₋₁₂ alkynylene, optionally substituted C₂₋₁₂ heteroalkylene, optionally substituted C₆₋₁₀ arylene, optionally substituted C₁₋₉ heteroarylene, or optionally substituted C₁₋₉ heterocyclylene;
[0149] each Q⁵ is independently absent, —CO—, —NH—, —O—, —S—, —SO₂—, —CH₂—, —C(O)O—, —OC(O)—, —C(O)NH—, —NH—C(O)—, —NH—CH(R^{a})—C(O)—, or —C(O)—CH(R^{a})—NH—;
[0150] each Q⁷ is independently optionally substituted C₁₋₆ alkane-triyl, optionally substituted C₁₋₆ alkane-tetrayl, optionally substituted C₂₋₆ heteroalkane-triyl, or optionally substituted C₂₋₆ heteroalkane-tetrayl; and
[0151] each R^{a} is independently H or an amino acid side chain;
[0152] provided that at least one of Q³, Q⁴, and Q⁵ is present.

[0153] In some aspects, each Q⁴ is independently absent, optionally substituted C₁₋₁₂ alkylene, optionally substituted C₂₋₁₂ alkenylene, optionally substituted C₂₋₁₂ alkynylene, optionally substituted C₂₋₁₂ heteroalkylene, or optionally substituted C₁₋₉ heterocyclylene. In certain aspects, s is 1, 2, 3, 4, 5, 6, 7, 8, 9, 10, 11, 12, 13, 14, 15, 16, 17, 18, 19, or 20.

[0154] Thus, in formula (II), LinkA may include a single branching point, if each p1 is 0, or multiple branching points, if at least one p1 is 1.

[0155] In formula (II), Q¹ may be —O-Q^{L}-Q^{C}-, where Q^{L} is optionally substituted C₂₋₁₂ heteroalkylene, optionally substituted C₁₋₁₂ alkylene, or -(optionally substituted C1-6 alkylene)-(optionally substituted C₆₋₁₀ arylene)-. In some aspects, Q^{L} is optionally substituted C₂₋₁₂ heteroalkylene or optionally substituted C₁₋₁₂ alkylene. In formula (II) Q^{C} may be:

[chemical structure]

[0156] In formula (II), Q² may be a linear group of formula [-Q³-Q⁴-Q⁵]ₛ- where Q³, Q⁴, and Q⁵ are as defined for formula (II). Alternatively, Q² may be a branched group [-Q³-Q⁴-Q⁵]ₛ-Q⁷([-Q³-Q⁴-Q⁵]ₛ-(Q⁷)ₚ₁)ₚ₂, where each Q⁷ is independently optionally substituted C₁₋₆ alkane-triyl, optionally substituted C₁₋₆ alkane-tetrayl, optionally substituted C₂₋₆ heteroalkane-triyl, or optionally substituted C₂₋₆ heteroalkane-tetrayl;
[0157] where
[0158] p1 is 0 or 1;
[0159] p2 is 0, 1, 2, or 3;
[0160] where,
   [0161] when p1 is 0, LinkA is a trivalent or tetravalent linker, and,
   [0162] when p1 is 1, LinkA is a tetravalent, pentavalent, or hexavalent linker.

[0163] In certain aspects, p1 is 0.

[0164] In some aspects, Q⁷ is:

[chemical structure]

[0165] Compounds that may be used in the preparation of group -LinkA(-T)p in formula (I) are described herein as well as in WO 2015/188197. Non-limiting examples of -LinkA include:

[chemical structure]

[chemical structure]

[chemical structure]

[0166] where
[0167] R¹⁸ is a bond to MOIETY,
[0168] each R¹⁹ is independently a bond to auxiliary moiety,
[0169] each m5 is independently an integer from 1 to 20,
[0170] each m6 is independently an integer from 1 to 10,
[0171] m7 is an integer from 1 to 6, and
[0172] each X⁶ is independently O or S.

[0173] In formula (II), when the conjugation linker is of formula [-Q³-Q⁴-Q⁵]ₛ-Q^{C}-, -Q²([-Q³-Q⁴-Q⁵]ₛ-Q⁶-T)ₚ may be.

[chemical structure]

[chemical structure]

[0174] where
[0175] R²⁰ is a bond to Q^{C} in Q¹
[0176] each R¹⁹ is independently a bond to an auxiliary moiety,
[0177] each m5 is independently an integer from 1 to 20,
[0178] each m6 is independently an integer from 1 to 10,
[0179] m7 is an integer from 1 to 6, and
[0180] each X⁶ is independently O or S.

[0181] In some aspects, the linker described herein is cleavable. In some aspects, the linker described herein is non-cleavable.

[0182] In some aspects, the polynucleic acid molecule described herein comprises a sense or antisense strand bonded to at least one group of formula (IV),

[chemical structure]

wherein at least one of Y1 or Y2 is a nucleotide from the polynucleic acid molecule.

[0183] In some instances, the Y1 is the last nucleotide on the 3′-terminus or the first nucleotide on the 5′-terminus of one of the strands of the polynucleic acid molecule. In some instances, the Y1 is the last nucleotide on the 3′-terminus or the first nucleotide on the 5′-terminus of the sense strand of the polynucleic acid molecule. In some instances, the Y1 is the last nucleotide on the 3′-terminus or the first nucleotide on the 5′-terminus of the sense strand of the polynucleic acid molecule, and the Y2 is a 3-hydroxy-propoxy group. In some instances, the Y2 is the first nucleotide on the 5′-terminus or the last nucleotide on the 3′-terminus of one of the strands of the polynucleic acid molecule. In some instances, the Y2 is the first nucleotide on the 5′-terminus or the last nucleotide on the 3′-terminus of the sense strand of the polynucleic acid molecule. In some instances, the Y2 is the first nucleotide on the 5′-terminus or the last nucleotide on the 3′-terminus of the sense strand of the polynucleic acid molecule, and the Y1 is a 3-hydroxy-propoxy group. In other instances, the Y1 and Y2 are two consecutive nucleotides in one of the strands of the polynucleic acid molecule.

[0184] In some aspects, the targeting moiety described herein is conjugated to 3′ end of the sense strand (e.g., formula (IV′)). In some aspects, the targeting moiety described herein is conjugated to 5′ end of the sense strand (e.g., formula (IV″) or (IV′″)). In some aspects, the targeting moiety described herein is conjugated to 3′ end of the antisense strand (e.g., formula (IV′)). In some aspects, the targeting moiety described herein is conjugated to 5′ end of the antisense strand (e.g., formula (IV″) or (IV′″)).

[chemical structure]

wherein Z in formula (IV′) is a moiety that corresponds to one of the sugar modifications described herein (e.g., —H, —OH, —O-Methyl, —F, or —O-methoxyethyl) and R in formula (IV′) is adenine, uracil, guanine, cytosine, thymine, abasic, or others.

[chemical structure]

wherein Z in formula (IV″) is a moiety that corresponds to one of the sugar modifications described herein (e.g., —H, —OH, —O-Methyl, —F, or —O-methoxyethyl) and R in formula (IV″) is adenine, uracil, guanine, cytosine, thymine, abasic, or others.

[chemical structure]

wherein Z in formula (IV′″) is a moiety that corresponds to one of the sugar modifications described herein (e.g., —H, —OH, —O-Methyl, —F, or —O-methoxyethyl) and R in formula (IV′″) is adenine, uracil, guanine, cytosine, thymine, abasic, or others.

### Pharmaceutical Compositions

[0185] Delivery of the polynucleotide molecules described herein can be achieved by contacting a cell with the construct using a variety of methods. In particular aspects, the polynucleotide molecule described herein is formulated with various excipients, vehicles, and carriers, as described more fully elsewhere herein.

[0186] A pharmaceutical composition described herein can be prepared to include a hybridized polynucleotide construct disclosed herein, into a form suitable for administration to a subject using carriers, excipients, and vehicles. Frequently used excipients include magnesium carbonate, titanium dioxide, lactose, mannitol and other sugars, talc, milk protein, gelatin, starch, vitamins, cellulose and its derivatives, animal and vegetable oils, polyethylene glycols and solvents, such as sterile water, alcohols, glycerol, and polyhydric alcohols. Intravenous vehicles include fluid and nutrient replenishers. Preservatives include antimicrobial, anti-oxidants, chelating agents, and inert gases. Other pharmaceutically acceptable vehicles include aqueous solutions, non-toxic excipients, including salts, preservatives, buffers and the like, as described, for instance, in Remington: The Science and Practice of Pharmacy, 21st Ed., Gennaro, Ed., Lippencott Williams & Wilkins (2005), and The United States Pharmacopeia: The National Formulary (USP 36 NF31), published in 2013. The pH and exact concentration of the various components of the pharmaceutical composition are adjusted according to routine skills in the art. See Goodman and Gilman's, The Pharmacological Basis for Therapeutics.

[0187] The pharmaceutical compositions described herein may be administered locally or systemically. The therapeutically effective amounts will vary according to factors, such as the degree of infection in a subject, the age, sex, and weight of the individual. Dosage regimes can be adjusted to provide the optimum therapeutic response. For example, several divided doses can be administered daily or the dose can be proportionally reduced as indicated by the exigencies of the therapeutic situation.

[0188] The pharmaceutical composition can be administered in a convenient manner, such as by injection (e.g., subcutaneous, intravenous, intraorbital, and the like), oral administration, ophthalmic application, inhalation, topical application, or rectal administration. Depending on the route of administration, the pharmaceutical composition can be coated with a material to protect the pharmaceutical composition from the action of enzymes, acids, and other natural conditions that may inactivate the pharmaceutical composition. The pharmaceutical composition can also be administered parenterally or intraperitoneally. Dispersions can also be prepared in glycerol, liquid polyethylene glycols, and mixtures thereof, and in oils. Under ordinary conditions of storage and use, these preparations may contain a preservative to prevent the growth of microorganisms.

[0189] Pharmaceutical compositions suitable for injectable use include sterile aqueous solutions (where water soluble) or dispersions and sterile powders for the extemporaneous preparation of sterile injectable solutions or dispersions. The composition will typically be sterile and fluid to the extent that easy syringability exists. Typically the composition will be stable under the conditions of manufacture and storage and preserved against the contaminating action of microorganisms, such as bacteria and fungi. The vehicle can be a solvent or dispersion medium containing, for example, water, ethanol, polyol (for example, glycerol, propylene glycol, and liquid polyethylene glycol, and the like), suitable mixtures thereof, and vegetable oils. The proper fluidity can be maintained, for example, by the use of a coating, such as lecithin, by the maintenance of the required particle size, in the case of dispersion, and by the use of surfactants. Prevention of the action of microorganisms can be achieved by various antibacterial and antifungal agents, for example, parabens, chlorobutanol, phenol, ascorbic acid, thimerosal, and the like. In many cases, isotonic agents, for example, sugars, polyalcohols, such as mannitol, sorbitol, or sodium chloride are used in the composition. Prolonged absorption of the injectable compositions can be brought about by including in the composition an agent that delays absorption, for example, aluminum monostearate and gelatin.

[0190] Sterile injectable solutions can be prepared by incorporating the pharmaceutical composition in the required amount in an appropriate solvent with one or a combination of ingredients enumerated above, as required, followed by filtered sterilization. Generally, dispersions are prepared by incorporating the pharmaceutical composition into a sterile vehicle that contains a basic dispersion medium and the required other ingredients from those enumerated above.

[0191] It is especially advantageous to formulate parenteral compositions in dosage unit form for ease of administration and uniformity of dosage. Dosage unit form as used herein, refers to physically discrete units suited as unitary dosages for the subject to be treated; each unit containing a predetermined quantity of pharmaceutical composition is calculated to produce the desired therapeutic effect in association with the required pharmaceutical vehicle. The specification for the dosage unit forms are related to the characteristics of the pharmaceutical composition and the particular therapeutic effect to be achieve. The principal pharmaceutical composition is compounded for convenient and effective administration in effective amounts with a suitable pharmaceutically acceptable vehicle in an acceptable dosage unit. In the case of compositions containing supplementary active ingredients, the dosages are determined by reference to the usual dose and manner of administration of the ingredients.

[0192] The pharmaceutical composition can be orally administered, for example, in a carrier, e.g., in an enteric-coated unit dosage form. The pharmaceutical composition and other ingredients can also be enclosed in a hard or soft-shell gelatin capsule or compressed into tablets. For oral therapeutic administration, the pharmaceutical composition can be incorporated with excipients and used in the form of ingestible tablets, troches, capsules, pills, wafers, and the like. Such compositions and preparations should contain at least 1% by weight of active compound. The percentage of the compositions and preparations can, of course, be varied and can conveniently be between about 5% to about 80% of the weight of the unit. The tablets, troches, pills, capsules, and the like can also contain the following: a binder, such as gum tragacanth, acacia, corn starch, or gelatin; excipients such as dicalcium phosphate; a disintegrating agent, such as corn starch, potato starch, alginic acid, and the like; a lubricant, such as magnesium stearate; and a sweetening agent, such as sucrose, lactose or saccharin, or a flavoring agent such as peppermint, oil of wintergreen, or cherry flavoring. When the dosage unit form is a capsule, it can contain, in addition to materials of the above type, a liquid carrier. Various other materials can be present as coatings or to otherwise modify the physical form of the dosage unit. For instance, tablets, pills, or capsules can be coated with shellac, sugar, or both. A syrup or elixir can contain the agent, sucrose as a sweetening agent, methyl and propylparabens as preservatives, a dye, and flavoring, such as cherry or orange flavor. Any material used in preparing any dosage unit form should be of pharmaceutically acceptable purity and substantially non-toxic in the amounts employed. In addition, the pharmaceutical composition can be incorporated into sustained-release preparations and formulations.

[0193] The pharmaceutical composition described herein may comprise one or more permeation enhancer that facilitates bioavailability of the polynucleotide molecule described herein. WO 2000/67798, Muranishi, 1990, Crit. Rev. Ther. Drug Carrier Systems, 7, 1, Lee et al., 1991, Crit. Rev. Ther. Drug Carrier Systems, 8, 91 are herein incorporated by reference in its entirety. In some aspects, the permeation enhancer is intestinal. In some aspects, the permeation enhancer is transdermal. In some aspects, the permeation enhancer is to facilitate crossing the brain-blood barrier. In some aspects, the permeation enhancer improves the permeability in the oral, nasal, buccal, pulmonary, vaginal, or corneal delivery model. In some aspects, the permeation enhancer is a fatty acid or a derivative thereof. In some aspects, the permeation enhancer is a surfactant or a derivative thereof. In some aspects, the permeation enhancer is a bile salt or a derivative thereof. In some aspects, the permeation enhancer is a chelating agent or a derivative thereof. In some aspects, the permeation enhancer is a non-chelating non-surfactant or a derivative thereof. In some aspects, the permeation enhancer is an ester or a derivative thereof. In some aspects, the permeation enhancer is an ether or a derivative thereof. In some specific aspects, the permeation enhancer is arachidonic acid, undecanoic acid, oleic acid, lauric acid, caprylic acid, capric acid, myristic acid, palmitic acid, stearic acid, linoleic acid, linolenic acid, dicaprate, tricaprate, monoolein, dilaurin, glyceryl 1-monocaprate, 1-dodecylazacycloheptan-2-one, an acylcamitine, an acylcholine, or a monoglyceride, a diglyceride or a pharmaceutically acceptable salt thereof. In one specific aspect, the permeation enhancer is sodium caprate (C10). In some specific aspects, the permeation enhancer is chenodeoxycholic acid (CDCA), ursodeoxychenodeoxycholic acid (UDCA), cholic acid, dehydrocholic acid, deoxycholic acid, glucholic acid, glycholic acid, glycodeoxycholic acid, taurocholic acid taurodeoxycholic acid, sodium tauro-24,25-dihydro-fusidate or sodium glycodihydrofusidate. In some specific aspects, the permeation enhancer is polyoxyethylene-9-lauryl ether, or polyoxyethylene-20-cetyl ether.

[0194] For the polynucleotide molecule described herein, suitable pharmaceutically acceptable salts include (i) salts formed with cations such as sodium, potassium, ammonium, magnesium, calcium, polyamines such as spermine and spermidine, etc.; (ii) acid addition salts formed with inorganic acids, for example hydrochloric acid, hydrobromic acid, sulfuric acid, phosphoric acid, and the like; and (iii) salts formed with organic acids such as, for example, acetic acid, oxalic acid, tartaric acid, succinic acid, maleic acid, fumaric acid, gluconic acid, citric acid, malic acid, ascorbic acid, benzoic acid, tannic acid, palmitic acid, alginic acid, polyglutamic acid, naphthalenesulfonic acid, methanesulfonic acid, p-toluenesulfonic acid, naphthalenedisulfonic acid, polygalacturonic acid, and the like.

[0195] While the hybridized polynucleotide constructs described herein may not require the use of excipients for delivery to the target cell, the use of excipients may be advantageous in some aspects. Thus, for delivery to the target cell, the hybridized polynucleotide molecule described herein can non-covalently bind an excipient to form a complex. The excipient can be used to alter biodistribution after delivery, to enhance uptake, to increase half-life or stability of the strands in the hybridized polynucleotide constructs (e.g., improve nuclease resistance), and/or to increase targeting to a particular cell or tissue type.

[0196] Exemplary excipients include a condensing agent (e.g., an agent capable of attracting or binding a nucleic acid through ionic or electrostatic interactions); a fusogenic agent (e.g., an agent capable of fusing and/or being transported through a cell membrane); a protein to target a particular cell or tissue type (e.g., thyrotropin, melanotropin, lectin, glycoprotein, surfactant protein A, or any other protein); a lipid; a lipopolysaccharide; a lipid micelle or a liposome (e.g., formed from phospholipids, such as phosphotidylcholine, fatty acids, glycolipids, ceramides, glycerides, cholesterols, or any combination thereof); a nanoparticle (e.g., silica, lipid, carbohydrate, or other pharmaceutically-acceptable polymer nanoparticle); a polyplex formed from cationic polymers and an anionic agent (e.g., a CRO), where exemplary cationic polymers include polyamines (e.g., polylysine, polyarginine, polyamidoamine, and polyethylene imine); cholesterol; a dendrimer (e.g., a polyamidoamine (PAMAM) dendrimer); a serum protein (e.g., human serum albumin (HSA) or low-density lipoprotein (LDL)); a carbohydrate (e.g., dextran, pullulan, chitin, chitosan, inulin, cyclodextrin, or hyaluronic acid); a lipid; a synthetic polymer, (e.g., polylysine (PLL), polyethylenimine, poly-L-aspartic acid, poly-L-glutamic acid, styrene-maleic acid anhydride copolymer, poly(L-lactide-co-glycolic) copolymer, divinyl ether-maleic anhydride copolymer, N-(2-hydroxypropyl)methacrylamide copolymer (HMPA), polyethylene glycol (PEG), polyvinyl alcohol (PVA), polyurethane, poly(2-ethylacrylic acid), N-isopropylacrylamide polymer, pseudopeptide-polyamine, peptidomimetic polyamine, or polyamine); a cationic moiety (e.g., cationic lipid, cationic porphyrin, quaternary salt of a polyamine, or alpha helical peptide); a multivalent sugar (e.g., multivalent lactose, multivalent galactose, N-acetyl-galactosamine, N-acetyl-glucosamine, multivalent mannose, or multivalent fucose); a vitamin (e.g., vitamin A, vitamin E, vitamin K, vitamin B, folic acid, vitamin B12, riboflavin, biotin, or pyridoxal); a cofactor; or a drug to disrupt cellular cytoskeleton to increase uptake (e.g., taxol, vincristine, vinblastine, cytochalasin, nocodazole, japlakinolide, latrunculin A, phalloidin, swinholide A, indanocine, or myoservin).

[0197] Other therapeutic agents as described herein may be included in a pharmaceutical composition described herein in combination with a polynucleotide molecule described herein.

### Methods of Treatment

[0198] In some aspects, described herein is a method of modulating expression of PCSK9 gene in a subject, comprising: administering to the subject a polynucleic acid molecule described herein, a polynucleic acid molecule conjugate described herein, or a pharmaceutical composition described herein, thereby modulating the expression of PCSK9 gene in the subject.

[0199] In some specific aspects, the method described herein reduces expression of PCSK9 gene in a subject by about or at least 10% compared to a negative control. In some specific aspects, the method described herein reduces expression of PCSK9 gene in a subject by about or at least 20% compared to a negative control. In some specific aspects, the method described herein reduces expression of PCSK9 gene in a subject by about or at least 30% compared to a negative control. In some specific aspects, the method described herein reduces expression of PCSK9 gene in a subject by about or at least 40% compared to a negative control. In some specific aspects, the method described herein reduces expression of PCSK9 gene in a subject by about or at least 50% compared to a negative control. In some specific aspects, the method described herein reduces expression of PCSK9 gene in a subject by about or at least 60% compared to a negative control. In some specific aspects, the method described herein reduces expression of PCSK9 gene in a subject by about or at least 70% compared to a negative control. In some specific aspects, the method described herein reduces expression of PCSK9 gene in a subject by about or at least 80% compared to a negative control. In some specific aspects, the method described herein reduces expression of PCSK9 gene in a subject by about or at least 90% compared to a negative control. In some specific aspects, the method described herein reduces expression of PCSK9 gene in a subject by about 100% compared to a negative control.

[0200] In some specific aspects, the method described herein achieves an IC50 value of about 5 nM. In some specific aspects, the method described herein achieves an IC50 value of about 10 nM. In some specific aspects, the method described herein achieves an IC50 value of about 15 nM. In some specific aspects, the method described herein achieves an IC50 value of about 20 nM. In some specific aspects, the method described herein achieves an IC50 value of about 25 nM. In some specific aspects, the method described herein achieves an IC50 value of about 30 nM. In some specific aspects, the method described herein achieves an IC50 value of about 35 nM. In some specific aspects, the method described herein achieves an IC50 value of about 40 nM. In some specific aspects, the method described herein achieves an IC50 value of about 45 nM. In some specific aspects, the method described herein achieves an IC50 value of about 50 nM. In some specific aspects, the method described herein achieves an IC50 value of about 55 nM. In some specific aspects, the method described herein achieves an IC50 value of about 60 nM. In some specific aspects, the method described herein achieves an IC50 value of about 65 nM. In some specific aspects, the method described herein achieves an IC50 value of about 70 nM. In some specific aspects, the method described herein achieves an IC50 value of about 75 nM. In some specific aspects, the method described herein achieves an IC50 value of about 80 nM. In some specific aspects, the method described herein achieves an IC50 value of about 85 nM. In some specific aspects, the method described herein achieves an IC50 value of about 90 nM. In some specific aspects, the method described herein achieves an IC50 value of about 95 nM. In some specific aspects, the method described herein achieves an IC50 value of about 100 nM.

[0201] In some aspects, described herein is a method of modulating LDL in a subject in need thereof, comprising administering to the subject a polynucleic acid molecule described herein, a polynucleic acid molecule conjugate described herein, or a pharmaceutical composition described herein, wherein the polynucleic acid molecule described herein, the polynucleic acid molecule conjugate described herein, or the pharmaceutical composition described herein reduces the expression of PCSK9 gene in the subject.

[0202] In some specific aspects, the method described herein reduces LDL level in a subject by about or at least 10% compared to a negative control. In some specific aspects, the method described herein reduces LDL level in a subject by about or at least 20% compared to a negative control. In some specific aspects, the method described herein reduces LDL level in a subject by about or at least 30% compared to a negative control. In some specific aspects, the method described herein reduces LDL level in a subject by about or at least 40% compared to a negative control. In some specific aspects, the method described herein reduces LDL level in a subject by about or at least 50% compared to a negative control. In some specific aspects, the method described herein reduces LDL level in a subject by about or at least 60% compared to a negative control. In some specific aspects, the method described herein reduces LDL level in a subject by about or at least 70% compared to a negative control. In some specific aspects, the method described herein reduces LDL level in a subject by about or at least 80% compared to a negative control. In some specific aspects, the method described herein reduces LDL level in a subject by about or at least 90% compared to a negative control. In some specific aspects, the method described herein reduces LDL level in a subject by about 100% compared to a negative control.

[0203] In some aspects, the subject receiving the method described herein suffers from hypercholesterolemia. In some specific embodiment, the subject receiving the method described herein suffers from familial hypercholesterolemia. In other aspects, the subject receiving the method described herein suffers from other high cholesterol-associated diseases. In other aspects, the subject receiving the method described herein suffers from neuroinflammation. In other aspects, the subject receiving the method described herein suffers from Alzheimer's Disease. In other aspects, the subject receiving the method described herein suffers from AUD. In other aspects, the subject receiving the method described herein suffers from stroke.

[0204] In some aspects, described herein is a method of modulating cholesterol in a subject in need thereof, comprising: comprising administering to the subject a polynucleic acid molecule described herein, a polynucleic acid molecule conjugate described herein, or a pharmaceutical composition described herein, wherein the polynucleic acid molecule described herein, the polynucleic acid molecule conjugate described herein, or the pharmaceutical composition described herein reduces the expression of PCSK9 gene in the subject.

[0205] In some specific aspects, the method described herein reduces cholesterol level in a subject by about or at least 10% compared to a negative control. In some specific aspects, the method described herein reduces cholesterol level in a subject by about or at least 20% compared to a negative control. In some specific aspects, the method described herein reduces cholesterol level in a subject by about or at least 30% compared to a negative control. In some specific aspects, the method described herein reduces cholesterol level in a subject by about or at least 40% compared to a negative control. In some specific aspects, the method described herein reduces cholesterol level in a subject by about or at least 50% compared to a negative control. In some specific aspects, the method described herein reduces cholesterol level in a subject by about or at least 60% compared to a negative control. In some specific aspects, the method described herein reduces cholesterol level in a subject by about or at least 70% compared to a negative control. In some specific aspects, the method described herein reduces cholesterol level in a subject by about or at least 80% compared to a negative control. In some specific aspects, the method described herein reduces cholesterol level in a subject by about or at least 90% compared to a negative control. In some specific aspects, the method described herein reduces cholesterol level in a subject by about 100% compared to a negative control.

[0206] In some aspects, the subject receiving the method described herein suffers from hypercholesterolemia. In some specific embodiment, the subject receiving the method described herein suffers from familial hypercholesterolemia. In other aspects, the subject receiving the method described herein suffers from other high cholesterol-associated diseases. In other aspects, the subject receiving the method described herein suffers from neuroinflammation. In other aspects, the subject receiving the method described herein suffers from Alzheimer's Disease. In other aspects, the subject receiving the method described herein suffers from AUD. In other aspects, the subject receiving the method described herein suffers from stroke.

### EXAMPLES

[0207] These examples are provided for illustrative purposes only and not to limit the scope of the claims provided herein.

### Example 1—Testing PCSK9 siRNAs in Non-Human Primates

[0208] Five PCSK9 siRNAs (denoted as “SRS-001” to “SRS-005” from Table 1) were tested in a non-human primate study, with a known siRNA that targets PCSK9 (denoted as “SRS-006” in Table 1) as a benchmark.

TABLE 1
Sequences of siRNA Tested in Non-human Primates

| | | | | % | | | | | | | |
|---|---|---|---|---|---|---|---|---|---|---|---|
| | | | | remaining | | | % | | | | |
| | | | | after | | | remaining | | | | |
| | | | | siRNA | | | after | | | | |
| | | SEQ | | trans- | | | GalNAc- | | | SEQ | |
| siRNA | | ID | Unmodified Sequence | fection | 1 | 10 | siRNA | 100 | 500 | ID | |
| ID# | Strand | # | (5′-3′) | 100 pM | nM | nM | 10 nM | nM | Mn | # | Modified Sequence (5′-3′) |
| SRS- | sense | 1 | AGACCUGUUUUGCUUUUGUAA | 30 | 8 | 7 | 69 | 72 | 48 | 13 | asgsaccuGfuUfuUfgcuuuuguaa |
| 001 | | | | | | | | | | | |
| SRS- | anti- | 2 | UUACAAAAGCAAAACAGGUCUAG | | | | | | | 14 | usUfsacaaaagcaAfaAfcAfggucus |
| 001 | sense | | | | | | | | | | asg |
| SRS- | sense | 3 | UUUUGCUUUUGUAACUUGAAA | 25 | 8 | 4 | | | | 15 | ususuugcUfuUfuGfuaacuugaaa |
| 002 | | | | | | | | | | | |
| SRS- | anti- | 4 | UUUCAAGUUACAAAAGCAAAACA | | | | | | | 16 | usUfsucaaguuacAfaAfaGfcaaaas |
| 002 | sense | | | | | | | | | | csa |
| SRS | sense | 5 | CUUUUGUAACUUGAAGAUAUU | 14 | 7 | 3 | 63 | 36 | 35 | 17 | csusuuugUfaAfcUfugaagauauu |
| 003 | | | | | | | | | | | |
| SRS- | anti- | 6 | AAUAUCUUCAAGUUACAAAAGCA | | | | | | | 18 | asAfsuaucuucaaGfuUfaCfaaaags |
| 003 | sense | | | | | | | | | | csa |
| SRS- | sense | 7 | UUUUGUAGCAUUUUUAUUAAU | 27 | 8 | 6 | 68 | 63 | 68 | 19 | ususuuguAfgCfaUfuuuuauuaau |
| 004 | | | | | | | | | | | |
| SRS- | anti- | 8 | AUUAAUAAAAAUGCUACAAAACC | | | | | | | 20 | asUfsuaauaaaaaUfgCfuAfcaaaas |
| 004 | sense | | | | | | | | | | csc |
| SRS- | sense | 9 | UUGUAGCAUUUUUAUUAAUAU | 26 | 4 | 3 | | | | 21 | ususguagCfaUfuUfuuauuaauau |
| 005 | | | | | | | | | | | |
| SRS- | anti- | 10 | AUAUUAAUAAAAAUGCUACAAAA | | | | | | | 22 | asUfsauuaauaaaAfaUfgCfuacaas |
| 005 | sense | | | | | | | | | | asa |
| SRS- | sense | 11 | CUAGACCUGUTUUGCUUUUGU | | | | 83 | 64 | 52 | 23 | csusagacCfuGfudTuugcuuuugu |
| 006 | | | | | | | | | | | |
| SRS- | anti- | 12 | ACAAAAGCAAAACAGGUCUAGAA | | | | | | | 24 | asCfsaAfAfAfgCfaAfaAfcAfgG |
| 006 | sense | | | | | | | | | | fuCfuagsasa |

Note for the column of “modified sequence”:
“A” refers to adenosine-3′-phosphate; “a” refers to 2′-O-methyladenosine-3′-phosphate; “Af” refers to 2′-fluoroadenosine-3′-phosphate; “dA” refers to 2′-deoxyadenosine-3-phosphate; “C” refers to cytidine-3′-phosphate; “c” refers to 2′-O-methylcytidine-3′-phosphate; “Cf” refers to 2′-fluorocytidine-3′-phosphate; “dC” refers to 2′-deoxycytidine-3′-phosphate; “G” refers to guanosine-3′-phosphate; “g” refers to 2′-O-methylguanosine-3′-phosphate; “Gf” refers to 2′-fluoroguanosine-3′-phosphate; “dG” refers to 2′-deoxy guanosine-3′-phosphate; “U” refers to uridine-3′-phosphate; “u” refers to 2′-O-methyluridine-3′-phosphate; “Uf” refers to 2′-fluorouridine-3′-phosphate; “T” refers to 5-methyluridine-3′-phosphate; “t” refers to 2′-O-methyl-5-methyluridine-3′-phosphate; “Tf” refers to 2′-fluoro-5-methyluridine-3′-phosphate; “dT” refers to 2′-deoxythymidine-3′-phosphate; “s” refers to 3′-phosphorothioate.

[0209] As illustrated in FIG. 1A to FIG. 1J, SRS-001 to SRS-005 were tested with SRS-006 as a control, and serum PCSK9 expression levels, LDL-c levels, total cholesterol levels, triglyceride levels, and HDL-c levels were monitored and quantified in comparison with the pre-dose level. Other clinical markers (e.g., body weight, food intake, total energy intake, clinical chemistry, complete blood count (CBC), animal training, cage-side observation, and clinical behavior check, etc.) were also monitored. Specifically, clinical chemistry was profiled with the followed parameters: GLU, INS, Cr, BUN, AST, ALT, ALB, BIL, Ca, PHOS, ALP, GGT, TP, CO2, CK, Na, K, CL, GLB, and A/G. CBC was performed for WBC, RBC, HGB, HCT, MCV, MCH, MCHC, PLT, RDW-CV, MPV, NEUT, NEUT %, LYMP, LYMP %, MONO, MONO %, EO, EO %, BASO, and BASO %. Exemplary items for the clinical behavior check included general appearance, respiration condition, urine condition, teeth condition, eyes condition, digestive system condition, genital and perineum condition, skin and pelage condition, behavior and neurological signs, oral cavity condition, mouth condition, ear condition, nose condition, intake condition, muscle condition, back condition, joint condition, bone condition, and extremities. A reduction of serum PCSK9 protein levels, LDL-c levels, and total cholesterol level were observed. Specifically, SRS-001 and SRS-002 effectively reduced PCSK9 protein levels, LDL-c levels, and total cholesterol level.

### Example 2—In Vitro Efficacy of siRNAs Targeting PCSK9

[0210] Primary non-human hepatocytes from BioreclamationIVT were thawed and plated on collagen-coated 96-well plates at a density of 5.4×10⁵ cells per well. Hepatocytes were treated with conjugated siRNAs in the absence of transfection reagents (free uptake). Cells were treated with siRNAs with a concentrations at 10 nM, 100 nM, or 500 nM. Cells were incubated at 37° C., 5% CO2 for 48 h. At the end of the incubation period, the cells were lysed, the mRNA was isolated, and the expression of the target gene was measured by qPCR and normalized to a house-keeping gene using standard protocols.

[0211] The modifications of the sense and antisense strands of the siRNAs tested are listed in Table 2. The in-vitro potency of the siRNAs are listed in Table 3.

TABLE 2
Sequences and Modifications of siRNAs Tested

| | | | | | | | | Antisense |
|---|---|---|---|---|---|---|---|---|
| | SEQ | | SEQ | Sense (5′→3′) | SEQ | | SEQ | (5′→3′) |
| Cmpd | ID | Sense (5′→3′) | ID | modified | ID | Antisense (5′→3′) | ID | modified |
| ID | No. | unmodified sequences | No. | sequences: | No. | unmodified sequences | No. | sequences |
| PCS | 25 | CCUCACCAAGAUC | 128 | cscsucacCaAGA | 231 | ACAUGCAGGAUCU | 334 | asCsaugcAggauC |
| K9- | | CUGCAUGU | | uccugcaugu | | UGGUGAGGUA | | uUgGugaggsusa |
| 1727- | | | | | | | | |
| 23 | | | | | | | | |
| PCS | 26 | CACCAAGAUCCUG | 129 | csasccaaGaUCC | 232 | AAGACAUGCAGGA | 335 | asAsgacaUgcagG |
| K9- | | CAUGUCUU | | ugcaugucuu | | UCUUGGUGAG | | aUcUuggugsasg |
| 1397- | | | | | | | | |
| 23 | | | | | | | | |
| PCS | 27 | CAAGAUCCUGCAU | 130 | csasagauCcUGC | 233 | UGGAAGACAUGCA | 336 | usGsgaagAcaugC |
| K9- | | GUCUUCCA | | augucuucca | | GGAUCUUGGU | | aGgAucuugsgsu |
| 1130- | | | | | | | | |
| 23 | | | | | | | | |
| PCS | 28 | UCCUGGCUUCCUG | 131 | uscscuggCuUC | 234 | AUCUUCACCAGGA | 337 | asUscuuc AccagG |
| K9- | | GUGAAGAU | | Cuggugaagau | | AGCCAGGAAG | | aAgCcaggasasg |
| 640- | | | | | | | | |
| 23 | | | | | | | | |
| PCS | 29 | CUGGCUUCCUGGU | 132 | csusggcuUcCU | 235 | UCAUCUUCACCAG | 338 | usCsaucuUcaccA |
| K9- | | GAAGAUGA | | Ggugaagauga | | GAAGCCAGGA | | gGaAgccagsgsa |
| 5061- | | | | | | | | |
| 23 | | | | | | | | |
| PCS | 30 | GGCUUCCUGGUGA | 133 | gsgscuucCuGG | 236 | ACUCAUCUUCACC | 339 | asCsucauCuucaC |
| K9- | | AGAUGAGU | | Ugaagaugagu | | AGGAAGCCAG | | cAgGaagccsasg |
| 1632- | | | | | | | | |
| 23 | | | | | | | | |
| PCS | 31 | GCUUCCUGGUGAA | 134 | gscsuuccUgGU | 237 | CACUCAUCUUCACC | 340 | csAscucaUcuucA |
| K9- | | GAUGAGUG | | Gaagaugagug | | AGGAAGCCA | | cCaGgaagcscsa |
| 4248- | | | | | | | | |
| 23 | | | | | | | | |
| PCS | 32 | UGGAGCUGGCCUU | 135 | usgsgagcUgGC | 238 | GCAACUUCAAGGC | 341 | gsCsaacuUcaagG |
| K9- | | GAAGUUGC | | Cuugaaguugc | | CAGCUCCAGC | | cCaGcuccasgsc |
| 3564- | | | | | | | | |
| 23 | | | | | | | | |
| PCS | 33 | AGUUGCCCCAUGU | 136 | asgsuugcCcCA | 239 | UGUAGUCGACAUG | 342 | usGsuaguCgacaU |
| K9- | | CGACUACA | | Ugucgacuaca | | GGGCAACUUC | | gGgGcaacususc |
| 3165- | | | | | | | | |
| 23 | | | | | | | | |
| PCS | 34 | UGCCCCAUGUCGA | 137 | usgsccccAuGU | 240 | CGAUGUAGUCGAC | 343 | csGsauguAgucgA |
| K9- | | CUACAUCG | | Cgacuacaucg | | AUGGGGCAAC | | cAuGgggcasasc |
| 1933- | | | | | | | | |
| 23 | | | | | | | | |
| PCS | 35 | CGGUACCGGGCGG | 138 | csgsguacCgGG | 241 | GUAUUCAUCCGCC | 344 | gsUsauucAuccgC |
| K9- | | AUGAAUAC | | Cggaugaauac | | CGGUACCGUG | | cCgGuaccgsusg |
| 4901- | | | | | | | | |
| 23 | | | | | | | | |
| PCS | 36 | GGUACCGGGCGGA | 139 | gsgsuaccGgGC | 242 | GGUAUUCAUCCGC | 345 | gsGsuauuCauccG |
| K9- | | UGAAUACC | | Ggaugaauacc | | CCGGUACCGU | | cCcGguaccsgsu |
| 1021- | | | | | | | | |
| 23 | | | | | | | | |
| PCS | 37 | GGCAGCCUGGUGG | 140 | gsgscagcCuGG | 243 | AUACACCUCCACCA | 346 | asUsacacCuccaCc |
| K9- | | AGGUGUAU | | Uggagguguau | | GGCUGCCUC | | AgGcugccsusc |
| 1977- | | | | | | | | |
| 23 | | | | | | | | |
| PCS | 38 | CAGCCUGGUGGAG | 141 | csasgccuGgUG | 244 | AGAUACACCUCCA | 347 | asGsauacAccucC |
| K9- | | GUGUAUCU | | Gagguguaucu | | CCAGGCUGCC | | aCcAggcugscsc |
| 727- | | | | | | | | |
| 23 | | | | | | | | |
| PCS | 39 | AGCCUGGUGGAGG | 142 | asgsccugGuGG | 245 | GAGAUACACCUCC | 348 | gsAsgauaCaccuC |
| K9- | | UGUAUCUC | | Agguguaucuc | | ACCAGGCUGC | | cAcCaggcusgsc |
| 2305- | | | | | | | | |
| 23 | | | | | | | | |
| PCS | 40 | GCCUGGUGGAGGU | 143 | gscscuggUgGA | 246 | GGAGAUACACCUC | 349 | gsGsagauAcaccU |
| K9- | | GUAUCUCC | | Gguguaucucc | | CACCAGGCUG | | cCaCcaggcsusg |
| 1330- | | | | | | | | |
| 23 | | | | | | | | |
| PCS | 41 | GUAUCUCCUAGAC | 144 | gsusaucuCcUA | 247 | AUGCUGGUGUCUA | 350 | asUsgcugGugucU |
| K9- | | ACCAGCAU | | Gacaccagcau | | GGAGAUACAC | | aGgAgauacsasc |
| 2942- | | | | | | | | |
| 23 | | | | | | | | |
| PCS | 42 | AUCUCCUAGACAC | 145 | asuscuccUaGAC | 248 | GUAUGCUGGUGUC | 351 | gsUsaugcUggugU |
| K9- | | CAGCAUAC | | accagcauac | | UAGGAGAUAC | | cUaGgagausasc |
| 3862- | | | | | | | | |
| 23 | | | | | | | | |
| PCS | 43 | UCCUAGACACCAG | 146 | uscscuagAcACC | 249 | UCUGUAUGCUGGU | 352 | usCsuguaUgcugG |
| K9- | | CAUACAGA | | agcauacaga | | GUCUAGGAGA | | uGuCuaggasgsa |
| 1225- | | | | | | | | |
| 23 | | | | | | | | |
| PCS | 44 | CUAGACACCAGCA | 147 | csusagacAcCAG | 250 | ACUCUGUAUGCUG | 353 | asCsucugUaugcU |
| K9- | | UACAGAGU | | cauacagagu | | GUGUCUAGGA | | gGuGucuagsgsa |
| 2328- | | | | | | | | |
| 23 | | | | | | | | |
| PCS | 45 | AUGGUCACCGACU | 148 | asusggucAcCG | 251 | AUUCUCGAAGUCG | 354 | asUsucucGaaguC |
| K9- | | UCGAGAAU | | Acuucgagaau | | GUGACCAUGA | | gGuGaccausgsa |
| 4494- | | | | | | | | |
| 23 | | | | | | | | |
| PCS | 46 | UCACCGACUUCGA | 149 | uscsaccgAcUUC | 252 | GCACAUUCUCGAA | 355 | gsCsacauUcucgA |
| K9- | | GAAUGUGC | | gagaaugugc | | GUCGGUGACC | | aGuCggugascsc |
| 2108- | | | | | | | | |
| 23 | | | | | | | | |
| PCS | 47 | CCUCAUAGGCCUG | 150 | cscsucauAgGCC | 253 | AUAAACUCCAGGC | 356 | asUsaaacUccagG |
| K9- | | GAGUUUAU | | uggaguuuau | | CUAUGAGGGU | | cCuAugaggsgsu |
| 1532- | | | | | | | | |
| 23 | | | | | | | | |
| PCS | 48 | GGCCUGGAGUUUA | 151 | gsgsccugGaGU | 254 | UUUCCGAAUAAAC | 357 | usUsuccgAauaaA |
| K9- | | UUCGGAAA | | Uuauucggaaa | | UCCAGGCCUA | | cUcCaggccsusa |
| 3158- | | | | | | | | |
| 23 | | | | | | | | |
| PCS | 49 | GCCUGGAGUUUAU | 152 | gscscuggAgUU | 255 | UUUUCCGAAUAAA | 358 | usUsuuccGaauaA |
| K9- | | UCGGAAAA | | Uauucggaaaa | | CUCCAGGCCU | | aCuCcaggcscsu |
| 2966- | | | | | | | | |
| 23 | | | | | | | | |
| PCS | 50 | UUGUGUCACAGAG | 153 | ususguguCaCA | 256 | AUGUCCCACUCUG | 359 | asUsguccCacucU |
| K9- | | UGGGACAU | | Gagugggacau | | UGACACAAAG | | gUgAcacaasasg |
| 3514- | | | | | | | | |
| 23 | | | | | | | | |
| PCS | 51 | CUGAUCCACUUCU | 154 | csusgaucCaCUU | 257 | UUUGGCAGAGAAG | 360 | usUsuggcAgagaA |
| K9- | | CUGCCAAA | | cucugccaaa | | UGGAUCAGUC | | gUgGaucagsusc |
| 3369- | | | | | | | | |
| 23 | | | | | | | | |
| PCS | 52 | AUCCACUUCUCUG | 155 | asusccacUuCUC | 258 | AUCUUUGGCAGAG | 361 | asUscuuuGgcagA |
| K9- | | CCAAAGAU | | ugccaaagau | | AAGUGGAUCA | | gAaGuggauscsa |
| 109- | | | | | | | | |
| 23 | | | | | | | | |
| PCS | 53 | UCUCUGCCAAAGA | 156 | uscsucugCcAA | 259 | UGAUGACAUCUUU | 362 | usGsaugaCaucuU |
| K9- | | UGUCAUCA | | Agaugucauca | | GGCAGAGAAG | | uGgCagagasasg |
| 821- | | | | | | | | |
| 23 | | | | | | | | |
| PCS | 54 | UGUCAUCAAUGAG | 157 | usgsucauCaAU | 260 | AACCAGGCCUCAU | 363 | asAsccagGccucA |
| K9- | | GCCUGGUU | | Gaggccugguu | | UGAUGACAUC | | uUgAugacasusc |
| 4228- | | | | | | | | |
| 23 | | | | | | | | |
| PCS | 55 | AGCUGUUUUGCAG | 158 | asgscuguUuUG | 261 | AUACAGUCCUGCA | 364 | asUsacagUccugC |
| K9- | | GACUGUAU | | Caggacuguau | | AAACAGCUGC | | aAaAcagcusgsc |
| 4399- | | | | | | | | |
| 23 | | | | | | | | |
| PCS | 56 | CUGUUUUGCAGGA | 159 | csusguuuUgCA | 262 | CCAUACAGUCCUG | 365 | csCsauacAguccU |
| K9- | | CUGUAUGG | | Ggacuguaugg | | CAAAACAGCU | | gCaAaacagscsu |
| 4785- | | | | | | | | |
| 23 | | | | | | | | |
| PCS | 57 | GGACUGUAUGGUC | 160 | gsgsacugUaUG | 263 | AGUGUGCUGACCA | 366 | asGsugugCugacC |
| K9- | | AGCACACU | | Gucagcacacu | | UACAGUCCUG | | aUaCaguccsusg |
| 1885- | | | | | | | | |
| 23 | | | | | | | | |
| PCS | 58 | ACUGUAUGGUCAG | 161 | ascsuguaUgGU | 264 | CGAGUGUGCUGAC | 367 | csGsagugUgcugA |
| K9- | | CACACUCG | | Cagcacacucg | | CAUACAGUCC | | cCaUacaguscsc |
| 3131- | | | | | | | | |
| 23 | | | | | | | | |
| PCS | 59 | CCCAGGUCUGGAA | 162 | cscscaggUcUG | 265 | ACUUUGCAUUCCA | 368 | asCsuuugCauucC |
| K9- | | UGCAAAGU | | Gaaugcaaagu | | GACCUGGGGC | | aGaCcugggsgsc |
| 3374- | | | | | | | | |
| 23 | | | | | | | | |
| PCS | 60 | UCUGGAAUGCAAA | 163 | uscsuggaAuGC | 266 | UCCUUGACUUUGC | 369 | usCscuugAcuuuG |
| K9- | | GUCAAGGA | | Aaagucaagga | | AUUCCAGACC | | cAuUccagascsc |
| 4465- | | | | | | | | |
| 23 | | | | | | | | |
| PCS | 61 | UAGACAACACGUG | 164 | usasgacaAcACG | 267 | UGACUACACACGU | 370 | usGsacuaCacacG |
| K9- | | UGUAGUCA | | uguguaguca | | GUUGUCUACG | | uGuUgucuascsg |
| 4027- | | | | | | | | |
| 23 | | | | | | | | |
| PCS | 62 | CUGGGGCUGAGCU | 165 | csusggggCuGA | 268 | CAUUUUAAAGCUC | 371 | csAsuuuuAaagcU |
| K9- | | UUAAAAUG | | Gcuuuaaaaug | | AGCCCCAGCC | | cAgCcccagscsc |
| 1571- | | | | | | | | |
| 23 | | | | | | | | |
| PCS | 63 | UGGGGCUGAGCUU | 166 | usgsgggcUgAG | 269 | CCAUUUUAAAGCU | 372 | csCsauuuUaaagC |
| K9- | | UAAAAUGG | | Cuuuaaaaugg | | CAGCCCCAGC | | uCaGccccasgsc |
| 1750- | | | | | | | | |
| 23 | | | | | | | | |
| PCS | 64 | GGGGCUGAGCUUU | 167 | gsgsggcuGaGC | 270 | ACCAUUUUAAAGC | 373 | asCscauuUuaaaG |
| K9- | | AAAAUGGU | | Uuuaaaauggu | | UCAGCCCCAG | | cUcAgccccsasg |
| 4079- | | | | | | | | |
| 23 | | | | | | | | |
| PCS | 65 | GGGCUGAGCUUUA | 168 | gsgsgcugAgCU | 271 | AACCAUUUUAAAG | 374 | asAsccauUuuaaA |
| K9- | | AAAUGGUU | | Uuaaaaugguu | | CUCAGCCCCA | | gCuCagcccscsa |
| 3172- | | | | | | | | |
| 23 | | | | | | | | |
| PCS | 66 | GGCUGAGCUUUAA | 169 | gsgscugaGcUU | 272 | GAACCAUUUUAAA | 375 | gsAsaccaUuuuaA |
| K9- | | AAUGGUUC | | Uaaaaugguuc | | GCUCAGCCCC | | aGcUcagccscsc |
| 4788- | | | | | | | | |
| 23 | | | | | | | | |
| PCS | 67 | AGCUUUAAAAUGG | 170 | asgscuuuAaAA | 273 | AGUCGGAACCAUU | 376 | asGsucggAaccaU |
| K9- | | UUCCGACU | | Ugguuccgacu | | UUAAAGCUCA | | uUuAaagcuscsa |
| 4139- | | | | | | | | |
| 23 | | | | | | | | |
| PCS | 68 | GCUUUAAAAUGGU | 171 | gscsuuuaAaAU | 274 | AAGUCGGAACCAU | 377 | asAsgucgGaaccA |
| K9- | | UCCGACUU | | Gguuccgacuu | | UUUAAAGCUC | | uUuUaaagcsusc |
| 5009- | | | | | | | | |
| 23 | | | | | | | | |
| PCS | 69 | UUUAAAAUGGUUC | 172 | ususuaaaAuGG | 275 | ACAAGUCGGAACC | 378 | asCsaaguCggaaC |
| K9- | | CGACUUGU | | Uuccgacuugu | | AUUUUAAAGC | | cAuUuuaaasgsc |
| 317- | | | | | | | | |
| 23 | | | | | | | | |
| PCS | 70 | UGCUGGCCUGGCC | 173 | usgscuggCcUG | 276 | CACUCAAGGGCCA | 379 | csAscucaAgggcC |
| K9- | | CUUGAGUG | | Gcccuugagug | | GGCCAGCAGC | | aGgCcagcasgsc |
| 3286- | | | | | | | | |
| 23 | | | | | | | | |
| PCS | 71 | GCUGGCCUGGCCC | 174 | gscsuggcCuGG | 277 | CCACUCAAGGGCC | 380 | csCsacuc AagggC |
| K9- | | UUGAGUGG | | Cccuugagugg | | AGGCCAGCAG | | cAgGccagcsasg |
| 2619- | | | | | | | | |
| 23 | | | | | | | | |
| PCS | 72 | CCCUCACUGUGGG | 175 | cscscucaCuGUG | 278 | UGAAAUGCCCCAC | 381 | usGsaaauGccccA |
| K9- | | GCAUUUCA | | gggcauuuca | | AGUGAGGGAG | | cAgUgagggsasg |
| 3186- | | | | | | | | |
| 23 | | | | | | | | |
| PCS | 73 | CACUGUGGGGCAU | 176 | csascuguGgGG | 279 | AUGGUGAAAUGCC | 382 | asUsggugAaaugC |
| K9- | | UUCACCAU | | Cauuucaccau | | CCACAGUGAG | | cCcAcagugsasg |
| 11-23 | | | | | | | | |
| PCS | 74 | CUGUGGGGCAUUU | 177 | csusguggGgCA | 280 | GAAUGGUGAAAUG | 383 | gsAsauggUgaaaU |
| K9- | | CACCAUUC | | Uuucaccauuc | | CCCCACAGUG | | gCcCcacagsusg |
| 840- | | | | | | | | |
| 23 | | | | | | | | |
| PCS | 75 | UGGGGCAUUUCAC | 178 | usgsgggcAuUU | 281 | UUUGAAUGGUGAA | 384 | usUsugaaUggugA |
| K9- | | CAUUCAAA | | Caccauucaaa | | AUGCCCCACA | | aAuGccccascsa |
| 404- | | | | | | | | |
| 23 | | | | | | | | |
| PCS | 76 | GCAUUUCACCAUU | 179 | gscsauuuCaCCA | 282 | CCUGUUUGAAUGG | 385 | csCsuguuUgaauG |
| K9- | | CAAACAGG | | uucaaacagg | | UGAAAUGCCC | | gUgAaaugcscsc |
| 26-23 | | | | | | | | |
| PCS | 77 | UUUAUUGAGCUCU | 180 | ususuauuGaGC | 283 | ACGGAACAAGAGC | 386 | asCsggaaCaagaG |
| K9- | | UGUUCCGU | | Ucuuguuccgu | | UCAAUAAAAG | | cUcAauaaasasg |
| 4467- | | | | | | | | |
| 23 | | | | | | | | |
| PCS | 78 | CCCUCAUCUCCAG | 181 | cscscucaUcUCC | 284 | ACAGUUAGCUGGA | 387 | asCsaguuAgcugG |
| K9- | | CUAACUGU | | agcuaacugu | | GAUGAGGGCC | | aGaUgagggscsc |
| 1934- | | | | | | | | |
| 23 | | | | | | | | |
| PCS | 79 | ACUGAGCCAGAAA | 182 | ascsugagCcAG | 285 | AAUCUGCGUUUCU | 388 | asAsucugCguuuC |
| K9- | | CGCAGAUU | | Aaacgcagauu | | GGCUCAGUUC | | uGgCucagususc |
| 1370- | | | | | | | | |
| 23 | | | | | | | | |
| PCS | 80 | UGAGCCAGAAACG | 183 | usgsagccAgAA | 286 | CCAAUCUGCGUUU | 389 | csCsaaucUgcguU |
| K9- | | CAGAUUGG | | Acgcagauugg | | CUGGCUCAGU | | uCuGgcucasgsu |
| 3338- | | | | | | | | |
| 23 | | | | | | | | |
| PCS | 81 | GAAGCCAAGCCUC | 184 | gsasagccAaGCC | 287 | AGUAAGAAGAGGC | 390 | asGsuaagAagagG |
| K9- | | UUCUUACU | | ucuucuuacu | | UUGGCUUCAG | | cUuGgcuucsasg |
| 4804- | | | | | | | | |
| 23 | | | | | | | | |
| PCS | 82 | AGCCAAGCCUCUU | 185 | asgsccaaGcCUC | 288 | GAAGUAAGAAGAG | 391 | gsAsaguaAgaagA |
| K9- | | CUUACUUC | | uuuuuu | | GCUUGGCUUC | | gGcUuggcususc |
| 1098- | | | | | | | | |
| 23 | | | | | | | | |
| PCS | 83 | CCCAAGCAAGCAG | 186 | cscscaagCaAGC | 289 | AUAAAUGUCUGCU | 392 | asUsaaauGucugC |
| K9- | | ACAUUUAU | | agacauuuau | | UGCUUGGGUG | | uUgCuugggsusg |
| 1350- | | | | | | | | |
| 23 | | | | | | | | |
| PCS | 84 | CCAAGCAAGCAGA | 187 | cscsaagcAaGCA | 290 | GAUAAAUGUCUGC | 393 | gsAsuaaaUgucuG |
| K9- | | CAUUUAUC | | gacauuuauc | | UUGCUUGGGU | | cUuGcuuggsgsu |
| 5305- | | | | | | | | |
| 23 | | | | | | | | |
| PCS | 85 | UUUUGGGUCUGUC | 188 | ususuuggGuCU | 291 | ACAGAGAGGACAG | 394 | asCsagagAggacA |
| K9- | | CUCUCUGU | | Guccucucugu | | ACCCAAAAGA | | gAcCcaaaasgsa |
| 478- | | | | | | | | |
| 23 | | | | | | | | |
| PCS | 86 | UCUGUCCUCUCUG | 189 | uscsugucCuCU | 292 | AAAGGCAACAGAG | 395 | asAsaggcAacagA |
| K9- | | UUGCCUUU | | Cuguugccuuu | | AGGACAGACC | | gAgGacagascsc |
| 4369- | | | | | | | | |
| 23 | | | | | | | | |
| PCS | 87 | CUGUCCUCUCUGU | 190 | csusguccUcUC | 293 | AAAAGGCAACAGA | 396 | asAsaaggCaacaG |
| K9- | | UGCCUUUU | | Uguugccuuuu | | GAGGACAGAC | | aGaGgacagsasc |
| 2723- | | | | | | | | |
| 23 | | | | | | | | |
| PCS | 88 | UGUCCUCUCUGUU | 191 | usgsuccuCuCU | 294 | AAAAAGGCAACAG | 397 | asAsaaagGcaacA |
| K9- | | GCCUUUUU | | Guugccuuuuu | | AGAGGACAGA | | gAgAggacasgsa |
| 1688- | | | | | | | | |
| 23 | | | | | | | | |
| PCS | 89 | GUCCUCUCUGUUG | 192 | gsusccucUcUG | 295 | UAAAAAGGCAACA | 398 | usAsaaaaGgcaaC |
| K9- | | CCUUUUUA | | Uugccuuuuua | | GAGAGGACAG | | aGaGaggacsasg |
| 84-23 | | | | | | | | |
| PCS | 90 | CCUCUCUGUUGCC | 193 | cscsucucUgUU | 296 | UGUAAAAAGGCAA | 399 | usGsuaaaAaggcA |
| K9- | | UUUUUACA | | Gccuuuuuaca | | CAGAGAGGAC | | aCaGagaggsasc |
| 3495- | | | | | | | | |
| 23 | | | | | | | | |
| PCS | 91 | GUUGCCUUUUUAC | 194 | gsusugccUuUU | 297 | AGUUGGCUGUAAA | 400 | asGsuuggCuguaA |
| K9- | | AGCCAACU | | Uacagccaacu | | AAGGCAACAG | | aAaGgcaacsasg |
| 2744- | | | | | | | | |
| 23 | | | | | | | | |
| PCS | 92 | UGCCUUUUUACAG | 195 | usgsccuuUuUA | 298 | AAAGUUGGCUGUA | 401 | asAsaguuGgcugU |
| K9- | | CCAACUUU | | Cagccaacuuu | | AAAAGGCAAC | | aAaAaggcasasc |
| 5036- | | | | | | | | |
| 23 | | | | | | | | |
| PCS | 93 | CCUUUUUACAGCC | 196 | cscsuuuuUaCA | 299 | GAAAAGUUGGCUG | 402 | gsAsaaagUuggcU |
| K9- | | AACUUUUC | | Gccaacuuuuc | | UAAAAAGGCA | | gUaAaaaggscsa |
| 1674- | | | | | | | | |
| 23 | | | | | | | | |
| PCS | 94 | UUUUACAGCCAAC | 197 | ususuuacAgCC | 300 | CUAGAAAAGUUGG | 403 | csUsagaaAaguuG |
| K9- | | UUUUCUAG | | Aacuuuucuag | | CUGUAAAAAG | | gCuGuaaaasasg |
| 4557- | | | | | | | | |
| 23 | | | | | | | | |
| PCS | 95 | GCCAACUUUUCUA | 198 | gscscaacUuUUC | 301 | AACAGGUCUAGAA | 404 | asAscaggUcuagA |
| K9- | | GACCUGUU | | uagaccuguu | | AAGUUGGCUG | | aAaGuuggcsusg |
| 1813- | | | | | | | | |
| 23 | | | | | | | | |
| PCS | 96 | CCAACUUUUCUAG | 199 | cscsaacuUuUCU | 302 | AAACAGGUCUAGA | 405 | asAsacagGucuaG |
| K9- | | ACCUGUUU | | agaccuguuu | | AAAGUUGGCU | | aAaAguuggscsu |
| 4497- | | | | | | | | |
| 23 | | | | | | | | |
| PCS | 97 | CAACUUUUCUAGA | 200 | csasacuuUuCU | 303 | AAAACAGGUCUAG | 406 | asAsaacaGgucuA |
| K9- | | CCUGUUUU | | Agaccuguuuu | | AAAAGUUGGC | | gAaAaguugsgsc |
| 2871- | | | | | | | | |
| 23 | | | | | | | | |
| PCS | 98 | ACUUUUCUAGACC | 201 | ascsuuuuCuAG | 304 | GCAAAACAGGUCU | 407 | gsCsaaaaCagguC |
| K9- | | UGUUUUGC | | Accuguuuugc | | AGAAAAGUUG | | uAgAaaagususg |
| 2000- | | | | | | | | |
| 23 | | | | | | | | |
| PCS | 99 | UUUUCUAGACCUG | 202 | ususuucuAgAC | 305 | AAGCAAAACAGGU | 408 | asAsgcaaAacagG |
| K9- | | UUUUGCUU | | Cuguuuugcuu | | CUAGAAAAGU | | uCuAgaaaasgsu |
| 47-23 | | | | | | | | |
| PCS | 100 | UUUCUAGACCUGU | 203 | ususucuaGaCC | 306 | AAAGCAAAACAGG | 409 | asAsagcaAaacaG |
| K9- | | UUUGCUUU | | Uguuuugcuuu | | UCUAGAAAAG | | gUcUagaaasasg |
| 1000- | | | | | | | | |
| 23 | | | | | | | | |
| PCS | 101 | UCUAGACCUGUUU | 204 | uscsuagaCcUG | 307 | CAAAAGCAAAACA | 410 | csAsaaagCaaaaCa |
| K9- | | UGCUUUUG | | Uuuugcuuuug | | GGUCUAGAAA | | GgUcuagasasa |
| 4329- | | | | | | | | |
| 23 | | | | | | | | |
| PCS | 102 | CUAGACCUGUUUU | 205 | csusagacCuGU | 308 | ACAAAAGCAAAAC | 411 | asCsaaaaGcaaaAc |
| K9- | | GCUUUUGU | | Uuugcuuugu | | AGGUCUAGAA | | AgGucuagsasa |
| 4826- | | | | | | | | |
| 23 | | | | | | | | |
| PCS | 103 | UAGACCUGUUUUG | 206 | usasgaccUgUU | 309 | UACAAAAGCAAAA | 412 | usAscaaaAgcaaA |
| K9- | | CUUUUGUA | | Uugcuuuugua | | CAGGUCUAGA | | aCaGgucuasgsa |
| 460- | | | | | | | | |
| 23 | | | | | | | | |
| PCS | 104 | AGACCUGUUUUGC | 207 | asgsaccuGuUU | 310 | UUACAAAAGCAAA | 413 | usUsacaaAagcaA |
| K9- | | UUUUGUAA | | Ugcuuuuguaa | | ACAGGUCUAG | | aAcAggucusasg |
| 2614- | | | | | | | | |
| 23 | | | | | | | | |
| PCS | 105 | GACCUGUUUUGCU | 208 | gsasccugUuUU | 311 | GUUACAAAAGCAA | 414 | gsUsuacaAaagcA |
| K9- | | UUUGUAAC | | Gcuuuuguaac | | AACAGGUCUA | | aAaCaggucsusa |
| 3284- | | | | | | | | |
| 23 | | | | | | | | |
| PCS | 106 | ACCUGUUUUGCUU | 209 | ascscuguUuUG | 312 | AGUUACAAAAGCA | 415 | asGsuuac AaaagC |
| K9- | | UUGUAACU | | Cuuuuguaacu | | AAACAGGUCU | | aAaAcagguscsu |
| 1766- | | | | | | | | |
| 23 | | | | | | | | |
| PCS | 107 | CUGUUUUGCUUUU | 210 | csusguuuUgCU | 313 | CAAGUUACAAAAG | 416 | csAsaguuAcaaaA |
| K9- | | GUAACUUG | | Uuuguaacuug | | CAAAACAGGU | | gCaAaacagsgsu |
| 3250- | | | | | | | | |
| 23 | | | | | | | | |
| PCS | 108 | GUUUUGCUUUUGU | 211 | gsusuuugCuUU | 314 | UUCAAGUUACAAA | 417 | usUscaagUuacaA |
| K9- | | AACUUGAA | | Uguaacuugaa | | AGCAAAACAG | | aAgCaaaacsasg |
| 2699- | | | | | | | | |
| 23 | | | | | | | | |
| PCS | 109 | UUUGCUUUUGUAA | 212 | ususugcuUuUG | 315 | UCUUCAAGUUACA | 418 | usCsuucaAguuaC |
| K9- | | CUUGAAGA | | Uaacuugaaga | | AAAGCAAAAC | | aAaAgcaaasasc |
| 2531- | | | | | | | | |
| 23 | | | | | | | | |
| PCS | 110 | UUGCUUUUGUAAC | 213 | ususgcuuUuGU | 316 | AUCUUCAAGUUAC | 419 | asUscuuc AaguuA |
| K9- | | UUGAAGAU | | Aacuugaagau | | AAAAGCAAAA | | cAaAagcaasasa |
| 1601- | | | | | | | | |
| 23 | | | | | | | | |
| PCS | 111 | CUUUUGUAACUUG | 214 | csusuuugUaAC | 317 | AAUAUCUUCAAGU | 420 | as Asuauc UucaaG |
| K9- | | AAGAUAUU | | Uugaagauauu | | UACAAAAGCA | | uUaCaaaagscsa |
| 1877- | | | | | | | | |
| 23 | | | | | | | | |
| PCS | 112 | UUUUGUAACUUGA | 215 | ususuuguAaCU | 318 | AAAUAUCUUCAAG | 421 | asAsauauCuucaA |
| K9- | | AGAUAUUU | | Ugaagauauuu | | UUACAAAAGC | | gUuAcaaaasgsc |
| 4491- | | | | | | | | |
| 23 | | | | | | | | |
| PCS | 113 | UUUGUAACUUGAA | 216 | ususuguaAcUU | 319 | UAAAUAUCUUCAA | 422 | usAsaauaUcuucA |
| K9- | | GAUAUUUA | | Gaagauauuua | | GUUACAAAAG | | aGuUacaaasasg |
| 3424- | | | | | | | | |
| 23 | | | | | | | | |
| PCS | 114 | UAACUUGAAGAUA | 217 | usasacuuGaAG | 320 | AGAAUAAAUAUCU | 423 | asGsaauaAauauC |
| K9- | | UUUAUUCU | | Auauuuauucu | | UCAAGUUACA | | uUcAaguuascsa |
| 2041- | | | | | | | | |
| 23 | | | | | | | | |
| PCS | 115 | AACUUGAAGAUAU | 218 | asascuugAaGA | 321 | CAGAAUAAAUAUC | 424 | csAsgaauAaauaU |
| K9- | | UUAUUCUG | | Uauuuauucug | | UUCAAGUUAC | | cUuCaaguusasc |
| 3270- | | | | | | | | |
| 23 | | | | | | | | |
| PCS | 116 | AAGAUAUUUAUUC | 219 | asasgauaUuUA | 322 | AAAACCCAGAAUA | 425 | asAsaaccCagaaUa |
| K9- | | UGGGUUUU | | Uucuggguuuu | | AAUAUCUUCA | | AaUaucuuscsa |
| 976- | | | | | | | | |
| 23 | | | | | | | | |
| PCS | 117 | AGAUAUUUAUUCU | 220 | asgsauauUuAU | 323 | CAAAACCCAGAAU | 426 | csAsaaacCcagaA |
| K9- | | GGGUUUUG | | Ucuggguuuug | | AAAUAUCUUC | | uAaAuaucususc |
| 1652- | | | | | | | | |
| 23 | | | | | | | | |
| PCS | 118 | AUAUUUAUUCUGG | 221 | asusauuu AuUC | 324 | UACAAAACCCAGA | 427 | usAscaaa AcccaG |
| K9- | | GUUUUGUA | | Uggguuuugua | | AUAAAUAUCU | | aAuAaauauscsu |
| 4408- | | | | | | | | |
| 23 | | | | | | | | |
| PCS | 119 | UAUUUAUUCUGGG | 222 | usasuuuaUuCU | 325 | CUACAAAACCCAG | 428 | csUsacaaAacccA |
| K9- | | UUUUGUAG | | Ggguuuuguag | | AAUAAAUAUC | | gAaUaaauasusc |
| 1023- | | | | | | | | |
| 23 | | | | | | | | |
| PCS | 120 | UUCUGGGUUUUGU | 223 | ususcuggGuUU | 326 | AAAAUGCUACAAA | 429 | asAsaaugCuacaA |
| K9- | | AGCAUUUU | | Uguagcauuuu | | ACCCAGAAUA | | aAcCcagaasusa |
| 998- | | | | | | | | |
| 23 | | | | | | | | |
| PCS | 121 | GGUUUUGUAGCAU | 224 | gsgsuuuuGuAG | 327 | UAAUAAAAAUGCU | 430 | usAsauaaAaaugC |
| K9- | | UUUUAUUA | | Cauuuuuauua | | ACAAAACCCA | | uAcAaaaccscsa |
| 2616- | | | | | | | | |
| 23 | | | | | | | | |
| PCS | 122 | GUUUUGUAGCAUU | 225 | gsusuuugUaGC | 328 | UUAAUAAAAAUGC | 431 | usUsaauaAaaauG |
| K9- | | UUUAUUAA | | Auuuuuauuaa | | UACAAAACCC | | cUaCaaaacscsc |
| 4780- | | | | | | | | |
| 23 | | | | | | | | |
| PCS | 123 | UUUUGUAGCAUUU | 226 | ususuuguAgCA | 329 | AUUAAUAAAAAUG | 432 | asUsuaauAaaaaU |
| K9- | | UUAUUAAU | | Uuuuuauuaau | | CUACAAAACC | | gCuAcaaaascsc |
| 1644- | | | | | | | | |
| 23 | | | | | | | | |
| PCS | 124 | AUUUUUAUUAAUA | 227 | asusuuuu AuUA | 330 | AGUCACCAUAUUA | 433 | asGsucacCauauU |
| K9- | | UGGUGACU | | Auauggugacu | | AUAAAAAUGC | | aAuAaaaausgsc |
| 4430- | | | | | | | | |
| 23 | | | | | | | | |
| PCS | 125 | UUUUUAUUAAUAU | 228 | ususuuuaUuAA | 331 | AAGUCACCAUAUU | 434 | asAsgucaCcauaU |
| K9- | | GGUGACUU | | Uauggugacuu | | AAUAAAAAUG | | uAaUaaaaasusg |
| 1274- | | | | | | | | |
| 23 | | | | | | | | |
| PCS | 126 | UUUUGCUUUUGUA | 229 | ususuugcUuUU | 332 | CUUCAAGUUACAA | 435 | csUsucaaGuuacA |
| K9- | | ACUUGAAG | | Guaacuugaag | | AAGCAAAACA | | aAaGcaaaascsa |
| 2790- | | | | | | | | |
| 23 | | | | | | | | |
| PCS | 127 | UUGUAGCAUUUUU | 230 | ususguagCaUU | 333 | AUAUUAAUAAAAA | 436 | asUsauuaAuaaaA |
| K9- | | AUUAAUAU | | Uuuauuaauau | | UGCUACAAAA | | aUgCuacaasasa |
| 5328- | | | | | | | | |
| 23 | | | | | | | | |

Notes (only applied to modified sequences in Table 2):
(s) = 3′-phosphorothioate; lower case = 2′ O-methyl modified nucleotide; uper case = 2′-fluoro modified nucleotide

TABLE 3
In Vitro Efficacy of siRNAs

| | | | | | | siRNA | |
|---|---|---|---|---|---|---|---|
| | | | | | | information | |
| | | | | | | position | |
| | | | | SEQ | | at | |
| | 500 | 100 | 10 | ID | Sequence context | human | |
| ID | nM | nM | nM | NO. | Sense (5′→3′) | transcripts | Region |
| PCSK9- | 39.4 | 48 | 9.1 | 437 | CCUCACCAAGAUCCUGC | 609 | CDS |
| 1727-23 | | | | | AUGU | | |
| PCSK9- | 38 | 38.7 | 38.3 | 438 | CACCAAGAUCCUGCAUG | 612 | CDS |
| 1397-23 | | | | | UCUU | | |
| PCSK9- | 34.2 | 36.1 | 26.8 | 439 | CAAGAUCCUGCAUGUCU | 615 | CDS |
| 1130-23 | | | | | UCCA | | |
| PCSK9-640- | 18.5 | 34.4 | 30.1 | 440 | UCCUGGCUUCCUGGUGA | 645 | CDS |
| 23 | | | | | AGAU | | |
| PCSK9- | 18.7 | 29.1 | 18.9 | 441 | CUGGCUUCCUGGUGAAG | 647 | CDS |
| 5061-23 | | | | | AUGA | | |
| PCSK9- | 24.6 | 31.2 | 34.8 | 442 | GGCUUCCUGGUGAAGAU | 649 | CDS |
| 1632-23 | | | | | GAGU | | |
| PCSK9- | 71.1 | 36.8 | 17.3 | 443 | GCUUCCUGGUGAAGAUG | 650 | CDS |
| 4248-23 | | | | | AGUG | | |
| PCSK9- | −21 | 1.9 | 15.3 | 444 | UGGAGCUGGCCUUGAAG | 680 | CDS |
| 3564-23 | | | | | UUGC | | |
| PCSK9- | 14.8 | 28.2 | 27.4 | 445 | AGUUGCCCCAUGUCGAC | 695 | CDS |
| 3165-23 | | | | | UACA | | |
| PCSK9- | 74.6 | 64.7 | 33.4 | 446 | UGCCCCAUGUCGACUAC | 698 | CDS |
| 1933-23 | | | | | AUCG | | |
| PCSK9- | 68.7 | 56.2 | 22.5 | 447 | CGGUACCGGGCGGAUGA | 781 | CDS |
| 4901-23 | | | | | AUAC | | |
| PCSK9- | 11.5 | 32.6 | 30.8 | 448 | GGUACCGGGCGGAUGAA | 782 | CDS |
| 1021-23 | | | | | UACC | | |
| PCSK9- | 19.5 | 24.9 | 13.5 | 449 | GGCAGCCUGGUGGAGGU | 817 | CDS |
| 1977-23 | | | | | GUAU | | |
| PCSK9-727- | 9.2 | 28.4 | 32.4 | 450 | CAGCCUGGUGGAGGUGU | 819 | CDS |
| 23 | | | | | AUCU | | |
| PCSK9- | 26 | 31.7 | 23.5 | 451 | AGCCUGGUGGAGGUGUA | 820 | CDS |
| 2305-23 | | | | | UCUC | | |
| PCSK9- | 28.8 | 38 | 17.3 | 452 | GCCUGGUGGAGGUGUAU | 821 | CDS |
| 1330-23 | | | | | CUCC | | |
| PCSK9- | 38.6 | 25.4 | 13.8 | 453 | GUAUCUCCUAGACACCA | 834 | CDS |
| 2942-23 | | | | | GCAU | | |
| PCSK9- | 0.4 | 20.2 | 21.9 | 454 | AUCUCCUAGACACCAGC | 836 | CDS |
| 3862-23 | | | | | AUAC | | |
| PCSK9- | 19.1 | 2.5 | −19.6 | 455 | UCCUAGACACCAGCAUA | 839 | CDS |
| 1225-23 | | | | | CAGA | | |
| PCSK9- | 54.9 | 41.2 | 17.1 | 456 | CUAGACACCAGCAUACA | 841 | CDS |
| 2328-23 | | | | | GAGU | | |
| PCSK9- | 44.2 | 31.1 | 31.2 | 457 | AUGGUCACCGACUUCGA | 889 | CDS |
| 4494-23 | | | | | GAAU | | |
| PCSK9- | 42.7 | 32.7 | 30.8 | 458 | UCACCGACUUCGAGAAU | 893 | CDS |
| 2108-23 | | | | | GUGC | | |
| PCSK9- | 35.9 | 35.7 | 22 | 459 | CCUCAUAGGCCUGGAGU | 1080 | CDS |
| 1532-23 | | | | | UUAU | | |
| PCSK9- | 33.6 | 42.2 | 32.7 | 460 | GGCCUGGAGUUUAUUCG | 1087 | CDS |
| 3158-23 | | | | | GAAA | | |
| PCSK9- | −54.6 | −45.4 | −20.7 | 461 | GCCUGGAGUUUAUUCGG | 1088 | CDS |
| 2966-23 | | | | | AAAA | | |
| PCSK9- | −9.1 | −23.5 | 0 | 462 | UUGUGUCACAGAGUGGG | 1424 | CDS |
| 3514-23 | | | | | ACAU | | |
| PCSK9- | 7.6 | 9.2 | −0.5 | 463 | CUGAUCCACUUCUCUGC | 1531 | CDS |
| 3369-23 | | | | | CAAA | | |
| PCSK9-109- | 3.1 | −3.4 | −0.4 | 464 | AUCCACUUCUCUGCCAA | 1534 | CDS |
| 23 | | | | | AGAU | | |
| PCSK9-821- | −12.2 | −20.43 | −17.5 | 465 | UCUCUGCCAAAGAUGUC | 1541 | CDS |
| 23 | | | | | AUCA | | |
| PCSK9- | −22.4 | −3 | −5.8 | 466 | UGUCAUCAAUGAGGCCU | 1554 | CDS |
| 4228-23 | | | | | GGUU | | |
| PCSK9- | 9.6 | 14.8 | 10.8 | 467 | AGCUGUUUUGCAGGACU | 1649 | CDS |
| 4399-23 | | | | | GUAU | | |
| PCSK9- | −4.7 | −29.7 | 10 | 468 | CUGUUUUGCAGGACUGU | 1651 | CDS |
| 4785-23 | | | | | AUGG | | |
| PCSK9- | −45.3 | 2.2 | −18.9 | 469 | GGACUGUAUGGUCAGCA | 1661 | CDS |
| 1885-23 | | | | | CACU | | |
| PCSK9- | −8.2 | 6.8 | 6.4 | 470 | ACUGUAUGGUCAGCACA | 1663 | CDS |
| 3131-23 | | | | | CUCG | | |
| PCSK9- | −14.7 | 5.8 | 11.3 | 471 | CCCAGGUCUGGAAUGCA | 2097 | CDS |
| 3374-23 | | | | | AAGU | | |
| PCSK9- | −8.3 | −5.1 | 15.9 | 472 | UCUGGAAUGCAAAGUCA | 2103 | CDS |
| 4465-23 | | | | | AGGA | | |
| PCSK9- | 17.5 | 14 | 9.1 | 473 | UAGACAACACGUGUGUA | 2237 | CDS |
| 4027-23 | | | | | GUCA | | |
| PCSK9- | −3.7 | 11.8 | 11.7 | 474 | CUGGGGCUGAGCUUUAA | 2408 | 3UTR |
| 1571-23 | | | | | AAUG | | |
| PCSK9- | −22.4 | 2.7 | 6.6 | 475 | UGGGGCUGAGCUUUAAA | 2409 | 3UTR |
| 1750-23 | | | | | AUGG | | |
| PCSK9- | −76.6 | −19.6 | −10 | 476 | GGGGCUGAGCUUUAAAA | 2410 | 3UTR |
| 4079-23 | | | | | UGGU | | |
| PCSK9- | −1.9 | 15 | −24.2 | 477 | GGGCUGAGCUUUAAAAU | 2411 | 3UTR |
| 3172-23 | | | | | GGUU | | |
| PCSK9- | 1.6 | 13 | 2.9 | 478 | GGCUGAGCUUUAAAAUG | 2412 | 3UTR |
| 4788-23 | | | | | GUUC | | |
| PCSK9- | 21.7 | 27.5 | 15.3 | 479 | AGCUUUAAAAUGGUUCC | 2417 | 3UTR |
| 4139-23 | | | | | GACU | | |
| PCSK9- | 19 | 15 | −2 | 480 | GCUUUAAAAUGGUUCCG | 2418 | 3UTR |
| 5009-23 | | | | | ACUU | | |
| PCSK9-317- | −2 | 16.9 | 3 | 481 | UUUAAAAUGGUUCCGAC | 2420 | 3UTR |
| 23 | | | | | UUGU | | |
| PCSK9- | 9.5 | 3.4 | −0.9 | 482 | UGCUGGCCUGGCCCUUG | 2503 | 3UTR |
| 3286-23 | | | | | AGUG | | |
| PCSK9- | 12.7 | 15.4 | 5.2 | 483 | GCUGGCCUGGCCCUUGA | 2504 | 3UTR |
| 2619-23 | | | | | GUGG | | |
| PCSK9- | −0.14 | 22 | 4.4 | 484 | CCCUCACUGUGGGGCAU | 2597 | 3UTR |
| 3186-23 | | | | | UUCA | | |
| PCSK9-11- | 37.9 | 43.2 | 30.1 | 485 | CACUGUGGGGCAUUUCA | 2601 | 3UTR |
| 23 | | | | | CCAU | | |
| PCSK9-840- | 28.5 | 17.8 | 1.4 | 486 | CUGUGGGGCAUUUCACC | 2603 | 3UTR |
| 23 | | | | | AUUC | | |
| PCSK9-404- | 7.6 | 9.8 | −24.7 | 487 | UGGGGCAUUUCACCAUU | 2606 | 3UTR |
| 23 | | | | | CAAA | | |
| PCSK9-26- | −3.8 | 11.5 | 13.3 | 488 | GCAUUUCACCAUUCAAA | 2610 | 3UTR |
| 23 | | | | | CAGG | | |
| PCSK9- | 46.6 | 42.8 | 10.6 | 489 | UUUAUUGAGCUCUUGUU | 2694 | 3UTR |
| 4467-23 | | | | | CCGU | | |
| PCSK9- | 28.6 | 26.6 | 6.7 | 490 | CCCUCAUCUCCAGCUAA | 2838 | 3UTR |
| 1934-23 | | | | | CUGU | | |
| PCSK9- | 36.3 | 38.1 | 5 | 491 | ACUGAGCCAGAAACGCA | 3196 | 3UTR |
| 1370-23 | | | | | GAUU | | |
| PCSK9- | 35 | 36.6 | 20 | 492 | UGAGCCAGAAACGCAGA | 3198 | 3UTR |
| 3338-23 | | | | | UUGG | | |
| PCSK9- | 13.8 | 19.9 | 27.2 | 493 | GAAGCCAAGCCUCUUCU | 3228 | 3UTR |
| 4804-23 | | | | | UACU | | |
| PCSK9- | 34.9 | 32.4 | 20.8 | 494 | AGCCAAGCCUCUUCUUA | 3230 | 3UTR |
| 1098-23 | | | | | CUUC | | |
| PCSK9- | 23.2 | 40.8 | 29.8 | 495 | CCCAAGCAAGCAGACAU | 3464 | 3UTR |
| 1350-23 | | | | | UUAU | | |
| PCSK9- | −19.6 | 13.9 | 5.8 | 496 | CCAAGCAAGCAGACAUU | 3465 | 3UTR |
| 5305-23 | | | | | UAUC | | |
| PCSK9-478- | 21 | −0.4 | 7.2 | 497 | UUUUGGGUCUGUCCUCU | 3486 | 3UTR |
| 23 | | | | | CUGU | | |
| PCSK9- | 47.8 | 34.6 | 28.9 | 498 | UCUGUCCUCUCUGUUGC | 3493 | 3UTR |
| 4369-23 | | | | | CUUU | | |
| PCSK9- | 32.2 | 44.3 | 41.9 | 499 | CUGUCCUCUCUGUUGCC | 3494 | 3UTR |
| 2723-23 | | | | | UUUU | | |
| PCSK9- | 47.1 | 50.7 | 46.2 | 500 | UGUCCUCUCUGUUGCCU | 3495 | 3UTR |
| 1688-23 | | | | | UUUU | | |
| PCSK9-84- | 23.5 | 34.6 | 28.9 | 501 | GUCCUCUCUGUUGCCUU | 3496 | 3UTR |
| 23 | | | | | UUUA | | |
| PCSK9- | 21 | 24.9 | 35 | 502 | CCUCUCUGUUGCCUUUU | 3498 | 3UTR |
| 3495-23 | | | | | UACA | | |
| PCSK9- | 29.1 | 41.5 | 45 | 503 | GUUGCCUUUUUACAGCC | 3505 | 3UTR |
| 2744-23 | | | | | AACU | | |
| PCSK9- | 51.1 | 43.7 | 20.4 | 504 | UGCCUUUUUACAGCCAA | 3507 | 3UTR |
| 5036-23 | | | | | CUUU | | |
| PCSK9- | 47.2 | 23.2 | −10.5 | 505 | CCUUUUUACAGCCAACU | 3509 | 3UTR |
| 1674-23 | | | | | UUUC | | |
| PCSK9- | 47.5 | 39.4 | 4.7 | 506 | UUUUACAGCCAACUUUU | 3512 | 3UTR |
| 4557-23 | | | | | CUAG | | |
| PCSK9- | 53.2 | 49.6 | 26.2 | 507 | GCCAACUUUUCUAGACC | 3519 | 3UTR |
| 1813-23 | | | | | UGUU | | |
| PCSK9- | 57.2 | 59.5 | 37.2 | 508 | CCAACUUUUCUAGACCU | 3520 | 3UTR |
| 4497-23 | | | | | GUUU | | |
| PCSK9- | 50.7 | 51.1 | 31.4 | 509 | CAACUUUUCUAGACCUG | 3521 | 3UTR |
| 2871-23 | | | | | UUUU | | |
| PCSK9- | 20.8 | 28.7 | 25 | 510 | ACUUUUCUAGACCUGUU | 3523 | 3UTR |
| 2000-23 | | | | | UUGC | | |
| PCSK9-47- | 44.1 | 44.8 | 32.1 | 511 | UUUUCUAGACCUGUUUU | 3525 | 3UTR |
| 23 | | | | | GCUU | | |
| PCSK9- | 62.7 | 54.8 | 31.4 | 512 | UUUCUAGACCUGUUUUG | 3526 | 3UTR |
| 1000-23 | | | | | CUUU | | |
| PCSK9- | 26.1 | 9.8 | 14 | 513 | UCUAGACCUGUUUUGCU | 3528 | 3UTR |
| 4329-23 | | | | | UUUG | | |
| PCSK9- | 48.4 | 35.9 | 17.4 | 514 | CUAGACCUGUUUUGCUU | 3529 | 3UTR |
| 4826-23 | | | | | UUGU | | |
| PCSK9-460- | 28.8 | 29.2 | 20 | 515 | UAGACCUGUUUUGCUUU | 3530 | 3UTR |
| 23 | | | | | UGUA | | |
| PCSK9- | 52.4 | 27.8 | 31 | 516 | AGACCUGUUUUGCUUUU | 3531 | 3UTR |
| 2614-23 | | | | | GUAA | | |
| PCSK9- | 11.1 | 1.9 | 11.9 | 517 | GACCUGUUUUGCUUUUG | 3532 | 3UTR |
| 3284-23 | | | | | UAAC | | |
| PCSK9- | 43.8 | 17 | 6 | 518 | ACCUGUUUUGCUUUUGU | 3533 | 3UTR |
| 1766-23 | | | | | AACU | | |
| PCSK9- | 32.9 | 31.1 | 13.3 | 519 | CUGUUUUGCUUUUGUAA | 3535 | 3UTR |
| 3250-23 | | | | | CUUG | | |
| PCSK9- | 47.7 | 29 | 20.6 | 520 | GUUUUGCUUUUGUAACU | 3537 | 3UTR |
| 2699-23 | | | | | UGAA | | |
| PCSK9- | 8.9 | 5.4 | −0.8 | 521 | UUUUGCUUUUGUAACUU | 3538 | 3UTR |
| 2790-23 | | | | | GAAG | | |
| PCSK9- | 22.4 | 15.1 | −18.8 | 522 | UUUGCUUUUGUAACUUG | 3539 | 3UTR |
| 2531-23 | | | | | AAGA | | |
| PCSK9- | 48.1 | 45 | 22.4 | 523 | UUGCUUUUGUAACUUGA | 3540 | 3UTR |
| 1601-23 | | | | | AGAU | | |
| PCSK9- | 65.6 | 64.2 | 37.4 | 524 | CUUUUGUAACUUGAAGA | 3543 | 3UTR |
| 1877-23 | | | | | UAUU | | |
| PCSK9- | 58 | 59 | 35.2 | 525 | UUUUGUAACUUGAAGAU | 3544 | 3UTR |
| 4491-23 | | | | | AUUU | | |
| PCSK9- | 58.4 | 50.8 | 29.7 | 526 | UUUGUAACUUGAAGAUA | 3545 | 3UTR |
| 3424-23 | | | | | UUUA | | |
| PCSK9- | 62.2 | 58.7 | 28.4 | 527 | UAACUUGAAGAUAUUUA | 3549 | 3UTR |
| 2041-23 | | | | | UUCU | | |
| PCSK9- | 42.7 | 36.9 | 33.7 | 528 | AACUUGAAGAUAUUUAU | 3550 | 3UTR |
| 3270-23 | | | | | UCUG | | |
| PCSK9-976- | 40 | 44 | 23.5 | 529 | AAGAUAUUUAUUCUGGG | 3556 | 3UTR |
| 23 | | | | | UUUU | | |
| PCSK9- | 18 | 1.1 | −21.9 | 530 | AGAUAUUUAUUCUGGGU | 3557 | 3UTR |
| 1652-23 | | | | | UUUG | | |
| PCSK9- | 14.9 | 23.6 | 18 | 531 | AUAUUUAUUCUGGGUUU | 3559 | 3UTR |
| 4408-23 | | | | | UGUA | | |
| PCSK9- | 22.9 | 25.6 | 12.5 | 532 | UAUUUAUUCUGGGUUUU | 3560 | 3UTR |
| 1023-23 | | | | | GUAG | | |
| PCSK9-998- | 55.3 | 51.1 | 35.3 | 533 | UUCUGGGUUUUGUAGCA | 3566 | 3UTR |
| 23 | | | | | UUUU | | |
| PCSK9- | 32.8 | 43.9 | 24.2 | 534 | GGUUUUGUAGCAUUUUU | 3571 | 3UTR |
| 2616-23 | | | | | AUUA | | |
| PCSK9- | 38.9 | 41 | 36.2 | 535 | GUUUUGUAGCAUUUUUA | 3572 | 3UTR |
| 4780-23 | | | | | UUAA | | |
| PCSK9- | 31.5 | 37.2 | 31.7 | 536 | UUUUGUAGCAUUUUUAU | 3573 | 3UTR |
| 1644-23 | | | | | UAAU | | |
| PCSK9- | 24 | 9.6 | 26.7 | 537 | UUGUAGCAUUUUUAUUA | 3575 | 3UTR |
| 5328-23 | | | | | AUAU | | |
| PCSK9- | 28 | 30.1 | 19.8 | 538 | AUUUUUAUUAAUAUGGU | 3582 | 3UTR |
| 4430-23 | | | | | GACU | | |
| PCSK9- | 13.8 | 29.5 | −1.2 | 539 | UUUUUAUUAAUAUGGUG | 3583 | 3UTR |
| 1274-23 | | | | | ACUU | | |

[0212] While preferred aspects of the present disclosure have been shown and described herein, it will be obvious to those skilled in the art that such aspects are provided by way of example only. Numerous variations, changes, and substitutions will now occur to those skilled in the art without departing from the disclosure. It should be understood that various alternatives to the aspects of the disclosure described herein may be employed in practicing the disclosure. It is intended that the following claims define the scope of the disclosure and that methods and structures within the scope of these claims and their equivalents be covered thereby.

What is claimed is:

1. A polynucleic acid molecule for modulating expression of proprotein convertase subtilisin/kexin type 9 serine protease (PCSK9) gene, wherein the polynucleic acid molecule comprises at least 16, 17, or 18 consecutive nucleotides that are complementary to a sequence selected from SEQ ID NOs: 1, 3, 5, 7, and 9 with no more than 1, 2, 3, 4 mismatches.

2. A polynucleic acid molecule for modulating expression of proprotein convertase subtilisin/kexin type 9 serine protease (PCSK9) gene, wherein the polynucleic acid molecule comprises a sequence that is at least 85%, at least 90%, at least 95% complementary to a sequence selected from SEQ ID NOs: 1, 3, 5, 7, and 9.

3. The polynucleic acid molecule of claim 1 or claim 2, wherein the polynucleic acid molecule is a double-stranded nucleic acid molecule comprising a sense strand and an antisense strand.

4. The polynucleic acid molecule of claim 3, wherein the sense strand comprises at least 85%, at least 90%, at least 95% identical to a sequence selected from SEQ ID NOs: 1, 3, 5, 7, and 9.

5. The polynucleic acid molecule of claim 3, wherein the antisense strand comprises at least 85%, at least 90%, at least 95% identical to a sequence selected from SEQ ID NOs: 2, 4, 6, 8, and 10.

6. The polynucleic acid molecule of one of claims 3-5, wherein the sense strand comprises a nucleic acid sequence comprising at least 16, 17, 18, 19, or 20 consecutive nucleotides of a sequence selected from SEQ ID NOs: 1, 3, 5, 7, and 9, with no more than 1, 2, 3, or 4 mismatches.

7. The polynucleic acid molecule of any one of claims 3-6, wherein the antisense strand comprises a nucleic acid sequence comprising at least 16, 17, 18, 19, or 20 consecutive nucleotides of a sequence selected from SEQ ID NOs: 2, 4, 6, 8, and 10, with no more than 1, 2, 3, or 4 mismatches

8. The polynucleic acid molecule of any one of claims 3-7, wherein the sense strand comprises one of SEQ ID NOs: 1, 3, 5, 7, 9, and the antisense strand comprises one of SEQ ID NOs: 2, 4, 6, 8, 10.

9. The polynucleic acid molecule of any one of claims 1-8, wherein the polynucleic acid molecule comprises (1) a 2′-fluoro modified nucleotides; (2) a 2′-O-methyl modified nucleotides; or (3) a modified internucleotide linkage.

10. The polynucleic acid molecule of any one of claims 1-9, wherein the polynucleic acid molecule comprises at least two consecutive modified internucleotide linkages at the 5′ end.

11. The polynucleic acid molecule of any one of claims 1-9, wherein the polynucleic acid molecule comprises at least two internucleotide linkages among three internucleotide linkages at the 3′end substituted with modified internucleotide linkages.

12. The polynucleic acid molecule of any one of claims 1-11, wherein the sense strand comprises ‘5-NfsnsNfnNfnNfnNfNfNfnNfnNfnNfnNfnNf-3’, wherein the antisense strand comprises ‘5-nsNfsnNfnNfnNfnNfnnnNfnNfnNfnNfnsnsn-3’, wherein “Nf” stands for a 2′-fluoro modified nucleotide, “n” stands for a 2′-O-methyl modified nucleotide, “s” stands for a 3′-phosphorothioate.

13. The polynucleic acid molecule of any one of claims 1-11, wherein the sense strand comprises ‘5-nsnsnnnnNfnNfNfNfnnnnnnnnnn-3’, wherein the antisense strand comprises ‘5-nsNfsnnnNfnNfNfnnnnNfnNfnnnnnsnsn-3’, wherein “Nf” stands for a 2′-fluoro modified nucleotide, “n” stands for a 2′-O-methyl modified nucleotide, “s” stands for a 3′-phosphorothioate.

14. The polynucleic acid molecule of any one of claims 1-11, wherein the sense strand comprises ‘5-nsnsnnnnnnNfnNfnnnnnnnnnn-3’, wherein the antisense strand comprises ‘5-nsNfsnnnnnnnnnNfnNfnnnnnnnsnsn-3’, wherein “Nf” stands for a 2′-fluoro modified nucleotide, “n” stands for a 2′-O-methyl modified nucleotide, “s” stands for a 3′-phosphorothioate.

15. The polynucleic acid molecule of any one of claims 1-11, wherein the sense strand comprises ‘5-nsnsnnnnNfnNfnNfnnnnnnnnnn-3’, wherein the antisense strand comprises ‘5-nsNfsnnnnnnnnnNfnNfnNfnnnnnsnsn-3’, wherein “Nf” stands for a 2′-fluoro modified nucleotide, “n” stands for a 2′-O-methyl modified nucleotide, “s” stands for a 3′-phosphorothioate.

16. The polynucleic acid molecule of any one of claims 9-15, wherein the modified internucleotide linkage is a phosphorothioate linkage.

17. The polynucleic acid molecule of claim 16, wherein the phosphorothioate linkage a stereochemically enriched phosphorothioate internucleotide linkage.

18. The polynucleic acid molecule of claim 17, wherein the stereochemically enriched phosphorothioate internucleotide linkage is an SP chiral internucleotide phosphorothioate linkage.

19. The polynucleic acid molecule of one of claim 9-15, wherein the polynucleic acid comprises a plurality of modified internucleotide linkages, and at least 1, 2, 3, or 4 of the plurality of modified internucleotide linkages are stereochemically enriched phosphorothioate internucleotide linkages.

20. The polynucleic acid molecule of claim 19, wherein the stereochemically enriched phosphorothioate internucleotide linkages comprise both R- and S-isomers.

21. The polynucleic acid molecule of one of claims 17-20, wherein the stereochemically enriched phosphorothioate internucleotide linkage(s) is disposed between two consecutive nucleosides that are two of six 5′ or 3′-terminal nucleosides of the sense strand or the antisense strand.

22. The polynucleic acid molecule of any one of claims 1-21, wherein the polynucleic acid molecule comprises a hypoxanthine nucleobase-containing nucleoside substitution.

23. The polynucleic acid molecule of claim 22, wherein the hypoxanthine nucleobase-containing nucleoside substitution is an inosine substitution.

24. The polynucleic acid molecule of claim 23, wherein the inosine substitution is within a seed region of the antisense strand.

25. The polynucleic acid molecule of claim 23, wherein the inosine substitution is within 7 nucleotides from the 5′ end of the antisense strand.

26. The polynucleic acid molecule of any one of claims 1-25, wherein the polynucleic acid molecule comprises an abasic substitution.

27. The polynucleic acid molecule of claim 26, wherein the abasic substitution is at the 5^{th} or 7^{th} nucleotide from the 5′ end.

28. The polynucleic acid molecule of any one of claims 9-27, wherein the cytotoxicity of the polynucleic acid molecule is decreased compared to unmodified polynucleic acid.

29. The polynucleic acid molecule of any one of claims 9-28, wherein the sense strand comprises a nucleic acid sequence that is at least 80%, at least 85%, at least 90%, at least 95% identical to a sequence selected from SEQ ID NOs: 13, 15, 17, 19, and 21.

30. The polynucleic acid molecule of any one of claims 9-28, wherein the sense strand comprises a nucleic acid sequence comprising at least 15, 16, 17, 18, 19, or 20 consecutive nucleotides of a sequence selected from SEQ ID NOs: 13, 15, 17, 19, and 21, with no more than 1, 2, 3, or 4 mismatches.

31. The polynucleic acid molecule of any one of claims 9-30, wherein the antisense strand comprises a nucleic acid sequence that is at least 85%, at least 90%, at least 95% identical to a sequence selected from SEQ ID NOs: 14, 16, 18, 20, and 22.

32. The polynucleic acid molecule of any one of claims 9-30, wherein the antisense strand comprises a nucleic acid sequence comprising at least 15, 16, 17, 18, 19, or 20 consecutive nucleotides of a sequence selected from SEQ ID NOs: 14, 16, 18, 20, and 22 with no more than 1, 2, 3, or 4 mismatches.

33. The polynucleic acid molecule of any one of claims 9-32, wherein the sense strand comprises a sequence selected from a nucleic acid sequence of SEQ ID NOs: 13, 15, 17, 19, and 21, and the antisense strand comprises a sequence selected from a nucleic acid sequence of SEQ ID NOs: 14, 16, 18, 20, and 22.

34. The polynucleic acid molecule of claim 1, wherein the polynucleic acid molecule is a single-stranded nucleic acid molecule.

35. The polynucleic acid molecule of any one of claims 1-34, wherein the polynucleic acid molecule is 16-30 base pairs in length.

36. The polynucleic acid molecule of any one of claims 1-34, wherein the polynucleic acid molecule is 19-25, or 21-23 base pairs in length.

37. A polynucleic acid molecule for modulating expression of proprotein convertase subtilisin/kexin type 9 serine protease (PCSK9) gene, wherein polynucleic acid molecule comprises:
(a) an antisense strand comprising the nucleotide sequence of usUfsacaaaagcaAfaAfcAfggucusasg (SEQ ID NO:14) and a sense strand comprising the nucleotide sequence of asgsaccuGfuUfuUfgcuuuuguaa (SEQ ID NO:13); or
(b) an antisense strand comprising the nucleotide sequence of usUfsucaaguuacAfaAfaGfcaaaascsa (SEQ ID NO:16) and a sense strand comprising the nucleotide sequence of ususuugcUfuUfuGfuaacuugaaa (SEQ ID NO:15);
wherein smaller case “n” stands for 2′-O-methyl modified nucleotide, upper case followed with an “f” (i.e., “Nf”) stands for 2′-fluoro modified nucleotide, and “s” stands for 3′-phosphorothioate.

38. A polynucleic acid molecule conjugate for modulating expression of proprotein convertase subtilisin/kexin type 9 serine protease (PCSK9) gene, wherein the polynucleic acid molecule conjugate comprises a polynucleic acid molecule of any one of claims 1-37 and an asialoglycoprotein receptor targeting moiety.

39. The polynucleic acid molecule conjugate of claim 38, wherein the polynucleic acid molecule and the asialoglycoprotein receptor targeting moiety is coupled via a linker.

40. The polynucleic acid molecule conjugate of claim 39, wherein the linker comprises formula (IV) below, [chemical structure]
wherein at least one of Y1 and Y2 is a nucleotide in the polynucleic acid molecule.

41. The polynucleic acid molecule conjugate of claim 40, wherein the Y1 is the last nucleotide on the 3′-terminus of the sense strand of the polynucleic acid molecule.

42. The polynucleic acid molecule conjugate of claim 40, wherein the Y1 and Y2 are two consecutive nucleotides in the polynucleic acid molecule.

43. The polynucleic acid molecule conjugate of any one of claims 38-42, wherein the asialoglycoprotein receptor targeting moiety comprises N-Acetylgalactosamine (GalNAc).

44. The polynucleic acid molecule conjugate of any one of claims 39-43, wherein the linker and the asialoglycoprotein receptor targeting moiety with the last nucleotide on the 3′-terminus of the sense strand of the polynucleic acid molecule are shown in Formula (V′): [chemical structure]
(V′), wherein Z in formula (V′) is —H, —OH, —O-Methyl, —F, or —O-methoxyethyl, and R in formula (V′) is adenine, uracil, guanine, cytosine, thymine, abasic, or others.

45. A pharmaceutical composition comprising a polynucleic acid molecule of any one of claims 1-37 or a polynucleic acid molecule conjugate of any one of claims 38-44, and a pharmaceutically acceptable excipient.

46. The pharmaceutical composition of claim 45, wherein the pharmaceutical composition is formulated as a nanoparticle formulation.

47. The pharmaceutical composition of claim 45 or claim 46, wherein the pharmaceutical composition is formulated for parenteral, oral, intranasal, buccal, rectal, transdermal, intravenous, subcutaneous, or intrathecal administration.

48. A method of modulating expression of proprotein convertase subtilisin/kexin type 9 serine protease (PCSK9) gene in a subject, comprising: administering to the subject a polynucleic acid molecule of any one of claims 1-37, a polynucleic acid molecule conjugate of any one of claims 38-44, or a pharmaceutical composition of claims 45-47, thereby modulating the expression of PCSK9 gene in the subject.

49. A method of modulating low-density lipoproteins (LDL) in a subject in need thereof, comprising: administering to the subject a polynucleic acid molecule of any one of claims 1-37, a polynucleic acid molecule conjugate of any one of claims 38-44, or a pharmaceutical composition of claims 45-47, wherein the polynucleic acid molecule of any one of claims 1-37, a polynucleic acid molecule conjugate of any one of claims 38-44, or a pharmaceutical composition of claims 45-47 reduces the expression of PCSK9 gene in the subject.

50. The method of claim 49, wherein the subject in need thereof suffers from hypercholesterolemia, familial hypercholesterolemia, or other high cholesterol-associated diseases.

51. A method of modulating cholesterol in a subject in need thereof, comprising: administering to the subject a polynucleic acid molecule of any one of claims 1-37, a polynucleic acid molecule conjugate of any one of claims 38-44, or a pharmaceutical composition of claims 45-47, wherein the polynucleic acid molecule of any one of claims 1-37, a polynucleic acid molecule conjugate of any one of claims 38-44, or a pharmaceutical composition of claims 45-47 reduces the expression of PCSK9 gene in the subject.

52. The method of claim 51, wherein the subject in need thereof suffers from hypercholesterolemia, familial hypercholesterolemia, or other high cholesterol-associated diseases.

The application's sequence listing, which the Patent Office published only in electronic form, follows.

SEQUENCE LISTING (539 sequences)

SEQ ID NO: 1 - RNA, 21 nt, synthetic construct
  source 1..21: mol_type = other RNA
agacctgttttgcttttgtaa

SEQ ID NO: 2 - RNA, 23 nt, synthetic construct
  source 1..23: mol_type = other RNA
ttacaaaagcaaaacaggtctag

SEQ ID NO: 3 - RNA, 21 nt, synthetic construct
  source 1..21: mol_type = other RNA
ttttgcttttgtaacttgaaa

SEQ ID NO: 4 - RNA, 23 nt, synthetic construct
  source 1..23: mol_type = other RNA
tttcaagttacaaaagcaaaaca

SEQ ID NO: 5 - RNA, 21 nt, synthetic construct
  source 1..21: mol_type = other RNA
cttttgtaacttgaagatatt

SEQ ID NO: 6 - RNA, 23 nt, synthetic construct
  source 1..23: mol_type = other RNA
aatatcttcaagttacaaaagca

SEQ ID NO: 7 - RNA, 21 nt, synthetic construct
  source 1..21: mol_type = other RNA
ttttgtagcatttttattaat

SEQ ID NO: 8 - RNA, 23 nt, synthetic construct
  source 1..23: mol_type = other RNA
attaataaaaatgctacaaaacc

SEQ ID NO: 9 - RNA, 21 nt, synthetic construct
  source 1..21: mol_type = other RNA
ttgtagcatttttattaatat

SEQ ID NO: 10 - RNA, 23 nt, synthetic construct
  source 1..23: mol_type = other RNA
atattaataaaaatgctacaaaa

SEQ ID NO: 11 - RNA, 21 nt, synthetic construct
  source 1..21: mol_type = other RNA
  modified_base 11: mod_base = OTHER; note = Thymine
ctagacctgttttgcttttgt

SEQ ID NO: 12 - RNA, 23 nt, synthetic construct
  source 1..23: mol_type = other RNA
acaaaagcaaaacaggtctagaa

SEQ ID NO: 13 - RNA, 21 nt, synthetic construct
  source 1..21: mol_type = other RNA
  modified_base 1: mod_base = OTHER; note = 2'-O-methyladenosine-3'-phosphorothioate
  modified_base 2: mod_base = OTHER; note = 2'-O-methylguanosine-3'-phosphorothioate
  modified_base 3: mod_base = OTHER; note = 2'-O-methyladenosine-3'-phosphate
  modified_base 4: mod_base = OTHER; note = 2'-O-methylcytidine-3'-phosphate
  modified_base 5: mod_base = OTHER; note = 2'-O-methylcytidine-3'-phosphate
  modified_base 6: mod_base = OTHER; note = 2'-O-methyluridine-3'-phosphate
  modified_base 7: mod_base = OTHER; note = 2'-fluoroguanosine-3'-phosphate
  modified_base 8: mod_base = OTHER; note = 2'-O-methyluridine-3'-phosphate
  modified_base 9: mod_base = OTHER; note = 2'-fluorouridine-3'-phosphate
  modified_base 10: mod_base = OTHER; note = 2'-O-methyluridine-3'-phosphate
  modified_base 11: mod_base = OTHER; note = 2'-fluorouridine-3'-phosphate
  modified_base 12: mod_base = OTHER; note = 2'-O-methylguanosine-3'-phosphate
  modified_base 13: mod_base = OTHER; note = 2'-O-methylcytidine-3'-phosphate
  modified_base 14: mod_base = OTHER; note = 2'-O-methyluridine-3'-phosphate
  modified_base 15: mod_base = OTHER; note = 2'-O-methyluridine-3'-phosphate
  modified_base 16: mod_base = OTHER; note = 2'-O-methyluridine-3'-phosphate
  modified_base 17: mod_base = OTHER; note = 2'-O-methyluridine-3'-phosphate
  modified_base 18: mod_base = OTHER; note = 2'-O-methylguanosine-3'-phosphate
  modified_base 19: mod_base = OTHER; note = 2'-O-methyluridine-3'-phosphate
  modified_base 20: mod_base = OTHER; note = 2'-O-methyladenosine-3'-phosphate
  modified_base 21: mod_base = OTHER; note = 2'-O-methyladenosine-3'-phosphate
agacctgttttgcttttgtaa

SEQ ID NO: 14 - RNA, 23 nt, synthetic construct
  source 1..23: mol_type = other RNA
  modified_base 1: mod_base = OTHER; note = 2'-O-methyluridine-3'-phosphorothioate
  modified_base 2: mod_base = OTHER; note = 2'-fluorouridine-3'-phosphorothioate
  modified_base 3: mod_base = OTHER; note = 2'-O-methyladenosine-3'-phosphate
  modified_base 4: mod_base = OTHER; note = 2'-O-methylcytidine-3'-phosphate
  modified_base 5: mod_base = OTHER; note = 2'-O-methyladenosine-3'-phosphate
  modified_base 6: mod_base = OTHER; note = 2'-O-methyladenosine-3'-phosphate
  modified_base 7: mod_base = OTHER; note = 2'-O-methyladenosine-3'-phosphate
  modified_base 8: mod_base = OTHER; note = 2'-O-methyladenosine-3'-phosphate
  modified_base 9: mod_base = OTHER; note = 2'-O-methylguanosine-3'-phosphate
  modified_base 10: mod_base = OTHER; note = 2'-O-methylcytidine-3'-phosphate
  modified_base 11: mod_base = OTHER; note = 2'-O-methyladenosine-3'-phosphate
  modified_base 12: mod_base = OTHER; note = 2'-fluoroadenosine-3'-phosphate
  modified_base 13: mod_base = OTHER; note = 2'-O-methyladenosine-3'-phosphate
  modified_base 14: mod_base = OTHER; note = 2'-fluoroadenosine-3'-phosphate
  modified_base 15: mod_base = OTHER; note = 2'-O-methylcytidine-3'-phosphate
  modified_base 16: mod_base = OTHER; note = 2'-fluoroadenosine-3'-phosphate
  modified_base 17: mod_base = OTHER; note = 2'-O-methylguanosine-3'-phosphate
  modified_base 18: mod_base = OTHER; note = 2'-O-methylguanosine-3'-phosphate
  modified_base 19: mod_base = OTHER; note = 2'-O-methyluridine-3'-phosphate
  modified_base 20: mod_base = OTHER; note = 2'-O-methylcytidine-3'-phosphate
  modified_base 21: mod_base = OTHER; note = 2'-O-methyluridine-3'-phosphorothioate
  modified_base 22: mod_base = OTHER; note = 2'-O-methyladenosine-3'-phosphorothioate
  modified_base 23: mod_base = OTHER; note = 2'-O-methylguanosine-3'-phosphate
ttacaaaagcaaaacaggtctag

SEQ ID NO: 15 - RNA, 21 nt, synthetic construct
  source 1..21: mol_type = other RNA
  modified_base 1: mod_base = OTHER; note = 2'-O-methyluridine-3'-phosphorothioate
  modified_base 2: mod_base = OTHER; note = 2'-O-methyluridine-3'-phosphorothioate
  modified_base 3: mod_base = OTHER; note = 2'-O-methyluridine-3'-phosphate
  modified_base 4: mod_base = OTHER; note = 2'-O-methyluridine-3'-phosphate
  modified_base 5: mod_base = OTHER; note = 2'-O-methylguanosine-3'-phosphate
  modified_base 6: mod_base = OTHER; note = 2'-O-methylcytidine-3'-phosphate
  modified_base 7: mod_base = OTHER; note = 2'-fluorouridine-3'-phosphate
  modified_base 8: mod_base = OTHER; note = 2'-O-methyluridine-3'-phosphate
  modified_base 9: mod_base = OTHER; note = 2'-fluorouridine-3'-phosphate
  modified_base 10: mod_base = OTHER; note = 2'-O-methyluridine-3'-phosphate
  modified_base 11: mod_base = OTHER; note = 2'-fluoroguanosine-3'-phosphate
  modified_base 12: mod_base = OTHER; note = 2'-O-methyluridine-3'-phosphate
  modified_base 13: mod_base = OTHER; note = 2'-O-methyladenosine-3'-phosphate
  modified_base 14: mod_base = OTHER; note = 2'-O-methyladenosine-3'-phosphate
  modified_base 15: mod_base = OTHER; note = 2'-O-methylcytidine-3'-phosphate
  modified_base 16: mod_base = OTHER; note = 2'-O-methyluridine-3'-phosphate
  modified_base 17: mod_base = OTHER; note = 2'-O-methyluridine-3'-phosphate
  modified_base 18: mod_base = OTHER; note = 2'-O-methylguanosine-3'-phosphate
  modified_base 19: mod_base = OTHER; note = 2'-O-methyladenosine-3'-phosphate
  modified_base 20: mod_base = OTHER; note = 2'-O-methyladenosine-3'-phosphate
  modified_base 21: mod_base = OTHER; note = 2'-O-methyladenosine-3'-phosphate
ttttgcttttgtaacttgaaa

SEQ ID NO: 16 - RNA, 23 nt, synthetic construct
  source 1..23: mol_type = other RNA
  modified_base 1: mod_base = OTHER; note = 2'-O-methyluridine-3'-phosphorothioate
  modified_base 2: mod_base = OTHER; note = 2'-fluorouridine-3'-phosphorothioate
  modified_base 3: mod_base = OTHER; note = 2'-O-methyluridine-3'-phosphate
  modified_base 4: mod_base = OTHER; note = 2'-O-methylcytidine-3'-phosphate
  modified_base 5: mod_base = OTHER; note = 2'-O-methyladenosine-3'-phosphate
  modified_base 6: mod_base = OTHER; note = 2'-O-methyladenosine-3'-phosphate
  modified_base 7: mod_base = OTHER; note = 2'-O-methylguanosine-3'-phosphate
  modified_base 8: mod_base = OTHER; note = 2'-O-methyluridine-3'-phosphate
  modified_base 9: mod_base = OTHER; note = 2'-O-methyluridine-3'-phosphate
  modified_base 10: mod_base = OTHER; note = 2'-O-methyladenosine-3'-phosphate
  modified_base 11: mod_base = OTHER; note = 2'-O-methylcytidine-3'-phosphate
  modified_base 12: mod_base = OTHER; note = 2'-fluoroadenosine-3'-phosphate
  modified_base 13: mod_base = OTHER; note = 2'-O-methyladenosine-3'-phosphate
  modified_base 14: mod_base = OTHER; note = 2'-fluoroadenosine-3'-phosphate
  modified_base 15: mod_base = OTHER; note = 2'-O-methyladenosine-3'-phosphate
  modified_base 16: mod_base = OTHER; note = 2'-fluoroguanosine-3'-phosphate
  modified_base 17: mod_base = OTHER; note = 2'-O-methylcytidine-3'-phosphate
  modified_base 18: mod_base = OTHER; note = 2'-O-methyladenosine-3'-phosphate
  modified_base 19: mod_base = OTHER; note = 2'-O-methyladenosine-3'-phosphate
  modified_base 20: mod_base = OTHER; note = 2'-O-methyladenosine-3'-phosphate
  modified_base 21: mod_base = OTHER; note = 2'-O-methyladenosine-3'-phosphorothioate
  modified_base 22: mod_base = OTHER; note = 2'-O-methylcytidine-3'-phosphorothioate
  modified_base 23: mod_base = OTHER; note = 2'-O-methyladenosine-3'-phosphate
tttcaagttacaaaagcaaaaca

SEQ ID NO: 17 - RNA, 21 nt, synthetic construct
  source 1..21: mol_type = other RNA
  modified_base 1: mod_base = OTHER; note = 2'-O-methylcytidine-3'-phosphorothioate
  modified_base 2: mod_base = OTHER; note = 2'-O-methyluridine-3'-phosphorothioate
  modified_base 3: mod_base = OTHER; note = 2'-O-methyluridine-3'-phosphate
  modified_base 4: mod_base = OTHER; note = 2'-O-methyluridine-3'-phosphate
  modified_base 5: mod_base = OTHER; note = 2'-O-methyluridine-3'-phosphate
  modified_base 6: mod_base = OTHER; note = 2'-O-methylguanosine-3'-phosphate
  modified_base 7: mod_base = OTHER; note = 2'-fluorouridine-3'-phosphate
  modified_base 8: mod_base = OTHER; note = 2'-O-methyladenosine-3'-phosphate
  modified_base 9: mod_base = OTHER; note = 2'-fluoroadenosine-3'-phosphate
  modified_base 10: mod_base = OTHER; note = 2'-O-methylcytidine-3'-phosphate
  modified_base 11: mod_base = OTHER; note = 2'-fluorouridine-3'-phosphate
  modified_base 12: mod_base = OTHER; note = 2'-O-methyluridine-3'-phosphate
  modified_base 13: mod_base = OTHER; note = 2'-O-methylguanosine-3'-phosphate
  modified_base 14: mod_base = OTHER; note = 2'-O-methyladenosine-3'-phosphate
  modified_base 15: mod_base = OTHER; note = 2'-O-methyladenosine-3'-phosphate
  modified_base 16: mod_base = OTHER; note = 2'-O-methylguanosine-3'-phosphate
  modified_base 17: mod_base = OTHER; note = 2'-O-methyladenosine-3'-phosphate
  modified_base 18: mod_base = OTHER; note = 2'-O-methyluridine-3'-phosphate
  modified_base 19: mod_base = OTHER; note = 2'-O-methyladenosine-3'-phosphate
  modified_base 20: mod_base = OTHER; note = 2'-O-methyluridine-3'-phosphate
  modified_base 21: mod_base = OTHER; note = 2'-O-methyluridine-3'-phosphate
cttttgtaacttgaagatatt

SEQ ID NO: 18 - RNA, 23 nt, synthetic construct
  source 1..23: mol_type = other RNA
  modified_base 1: mod_base = OTHER; note = 2'-O-methyladenosine-3'-phosphorothioate
  modified_base 2: mod_base = OTHER; note = 2'-fluoroadenosine-3'-phosphorothioate
  modified_base 3: mod_base = OTHER; note = 2'-O-methyluridine-3'-phosphate
  modified_base 4: mod_base = OTHER; note = 2'-O-methyladenosine-3'-phosphate
  modified_base 5: mod_base = OTHER; note = 2'-O-methyluridine-3'-phosphate
  modified_base 6: mod_base = OTHER; note = 2'-O-methylcytidine-3'-phosphate
  modified_base 7: mod_base = OTHER; note = 2'-O-methyluridine-3'-phosphate
  modified_base 8: mod_base = OTHER; note = 2'-O-methyluridine-3'-phosphate
  modified_base 9: mod_base = OTHER; note = 2'-O-methylcytidine-3'-phosphate
  modified_base 10: mod_base = OTHER; note = 2'-O-methyladenosine-3'-phosphate
  modified_base 11: mod_base = OTHER; note = 2'-O-methyladenosine-3'-phosphate
  modified_base 12: mod_base = OTHER; note = 2'-fluoroguanosine-3'-phosphate
  modified_base 13: mod_base = OTHER; note = 2'-O-methyluridine-3'-phosphate
  modified_base 14: mod_base = OTHER; note = 2'-fluorouridine-3'-phosphate
  modified_base 15: mod_base = OTHER; note = 2'-O-methyladenosine-3'-phosphate
  modified_base 16: mod_base = OTHER; note = 2'-fluorocytidine-3'-phosphate
  modified_base 17: mod_base = OTHER; note = 2'-O-methyladenosine-3'-phosphate
  modified_base 18: mod_base = OTHER; note = 2'-O-methyladenosine-3'-phosphate
  modified_base 19: mod_base = OTHER; note = 2'-O-methyladenosine-3'-phosphate
  modified_base 20: mod_base = OTHER; note = 2'-O-methyladenosine-3'-phosphate
  modified_base 21: mod_base = OTHER; note = 2'-O-methylguanosine-3'-phosphorothioate
  modified_base 22: mod_base = OTHER; note = 2'-O-methylcytidine-3'-phosphorothioate
  modified_base 23: mod_base = OTHER; note = 2'-O-methyladenosine-3'-phosphate
aatatcttcaagttacaaaagca

SEQ ID NO: 19 - RNA, 21 nt, synthetic construct
  source 1..21: mol_type = other RNA
  modified_base 1: mod_base = OTHER; note = 2'-O-methyluridine-3'-phosphorothioate
  modified_base 2: mod_base = OTHER; note = 2'-O-methyluridine-3'-phosphorothioate
  modified_base 3: mod_base = OTHER; note = 2'-O-methyluridine-3'-phosphate
  modified_base 4: mod_base = OTHER; note = 2'-O-methyluridine-3'-phosphate
  modified_base 5: mod_base = OTHER; note = 2'-O-methylguanosine-3'-phosphate
  modified_base 6: mod_base = OTHER; note = 2'-O-methyluridine-3'-phosphate
  modified_base 7: mod_base = OTHER; note = 2'-fluoroadenosine-3'-phosphate
  modified_base 8: mod_base = OTHER; note = 2'-O-methylguanosine-3'-phosphate
  modified_base 9: mod_base = OTHER; note = 2'-fluorocytidine-3'-phosphate
  modified_base 10: mod_base = OTHER; note = 2'-O-methyladenosine-3'-phosphate
  modified_base 11: mod_base = OTHER; note = 2'-fluorouridine-3'-phosphate
  modified_base 12: mod_base = OTHER; note = 2'-O-methyluridine-3'-phosphate
  modified_base 13: mod_base = OTHER; note = 2'-O-methyluridine-3'-phosphate
  modified_base 14: mod_base = OTHER; note = 2'-O-methyluridine-3'-phosphate
  modified_base 15: mod_base = OTHER; note = 2'-O-methyluridine-3'-phosphate
  modified_base 16: mod_base = OTHER; note = 2'-O-methyladenosine-3'-phosphate
  modified_base 17: mod_base = OTHER; note = 2'-O-methyluridine-3'-phosphate
  modified_base 18: mod_base = OTHER; note = 2'-O-methyluridine-3'-phosphate
  modified_base 19: mod_base = OTHER; note = 2'-O-methyladenosine-3'-phosphate
  modified_base 20: mod_base = OTHER; note = 2'-O-methyladenosine-3'-phosphate
  modified_base 21: mod_base = OTHER; note = 2'-O-methyluridine-3'-phosphate
ttttgtagcatttttattaat

SEQ ID NO: 20 - RNA, 23 nt, synthetic construct
  source 1..23: mol_type = other RNA
  modified_base 1: mod_base = OTHER; note = 2'-O-methyladenosine-3'-phosphorothioate
  modified_base 2: mod_base = OTHER; note = 2'-fluorouridine-3'-phosphorothioate
  modified_base 3: mod_base = OTHER; note = 2'-O-methyluridine-3'-phosphate
  modified_base 4: mod_base = OTHER; note = 2'-O-methyladenosine-3'-phosphate
  modified_base 5: mod_base = OTHER; note = 2'-O-methyladenosine-3'-phosphate
  modified_base 6: mod_base = OTHER; note = 2'-O-methyluridine-3'-phosphate
  modified_base 7: mod_base = OTHER; note = 2'-O-methyladenosine-3'-phosphate
  modified_base 8: mod_base = OTHER; note = 2'-O-methyladenosine-3'-phosphate
  modified_base 9: mod_base = OTHER; note = 2'-O-methyladenosine-3'-phosphate
  modified_base 10: mod_base = OTHER; note = 2'-O-methyladenosine-3'-phosphate
  modified_base 11: mod_base = OTHER; note = 2'-O-methyladenosine-3'-phosphate
  modified_base 12: mod_base = OTHER; note = 2'-fluorouridine-3'-phosphate
  modified_base 13: mod_base = OTHER; note = 2'-O-methylguanosine-3'-phosphate
  modified_base 14: mod_base = OTHER; note = 2'-fluorocytidine-3'-phosphate
  modified_base 15: mod_base = OTHER; note = 2'-O-methyluridine-3'-phosphate
  modified_base 16: mod_base = OTHER; note = 2'-fluoroadenosine-3'-phosphate
  modified_base 17: mod_base = OTHER; note = 2'-O-methylcytidine-3'-phosphate
  modified_base 18: mod_base = OTHER; note = 2'-O-methyladenosine-3'-phosphate
  modified_base 19: mod_base = OTHER; note = 2'-O-methyladenosine-3'-phosphate
  modified_base 20: mod_base = OTHER; note = 2'-O-methyladenosine-3'-phosphate
  modified_base 21: mod_base = OTHER; note = 2'-O-methyladenosine-3'-phosphorothioate
  modified_base 22: mod_base = OTHER; note = 2'-O-methylcytidine-3'-phosphorothioate
  modified_base 23: mod_base = OTHER; note = 2'-O-methylcytidine-3'-phosphate
attaataaaaatgctacaaaacc

SEQ ID NO: 21 - RNA, 21 nt, synthetic construct
  source 1..21: mol_type = other RNA
  modified_base 1: mod_base = OTHER; note = 2'-O-methyluridine-3'-phosphorothioate
  modified_base 2: mod_base = OTHER; note = 2'-O-methyluridine-3'-phosphorothioate
  modified_base 3: mod_base = OTHER; note = 2'-O-methylguanosine-3'-phosphate
  modified_base 4: mod_base = OTHER; note = 2'-O-methyluridine-3'-phosphate
  modified_base 5: mod_base = OTHER; note = 2'-O-methyladenosine-3'-phosphate
  modified_base 6: mod_base = OTHER; note = 2'-O-methylguanosine-3'-phosphate
  modified_base 7: mod_base = OTHER; note = 2'-fluorocytidine-3'-phosphate
  modified_base 8: mod_base = OTHER; note = 2'-O-methyladenosine-3'-phosphate
  modified_base 9: mod_base = OTHER; note = 2'-fluorouridine-3'-phosphate
  modified_base 10: mod_base = OTHER; note = 2'-O-methyluridine-3'-phosphate
  modified_base 11: mod_base = OTHER; note = 2'-fluorouridine-3'-phosphate
  modified_base 12: mod_base = OTHER; note = 2'-O-methyluridine-3'-phosphate
  modified_base 13: mod_base = OTHER; note = 2'-O-methyluridine-3'-phosphate
  modified_base 14: mod_base = OTHER; note = 2'-O-methyladenosine-3'-phosphate
  modified_base 15: mod_base = OTHER; note = 2'-O-methyluridine-3'-phosphate
  modified_base 16: mod_base = OTHER; note = 2'-O-methyluridine-3'-phosphate
  modified_base 17: mod_base = OTHER; note = 2'-O-methyladenosine-3'-phosphate
  modified_base 18: mod_base = OTHER; note = 2'-O-methyladenosine-3'-phosphate
  modified_base 19: mod_base = OTHER; note = 2'-O-methyluridine-3'-phosphate
  modified_base 20: mod_base = OTHER; note = 2'-O-methyladenosine-3'-phosphate
  modified_base 21: mod_base = OTHER; note = 2'-O-methyluridine-3'-phosphate
ttgtagcatttttattaatat

SEQ ID NO: 22 - RNA, 23 nt, synthetic construct
  source 1..23: mol_type = other RNA
  modified_base 1: mod_base = OTHER; note = 2'-O-methyladenosine-3'-phosphorothioate
  modified_base 2: mod_base = OTHER; note = 2'-fluorouridine-3'-phosphorothioate
  modified_base 3: mod_base = OTHER; note = 2'-O-methyladenosine-3'-phosphate
  modified_base 4: mod_base = OTHER; note = 2'-O-methyluridine-3'-phosphate
  modified_base 5: mod_base = OTHER; note = 2'-O-methyluridine-3'-phosphate
  modified_base 6: mod_base = OTHER; note = 2'-O-methyladenosine-3'-phosphate
  modified_base 7: mod_base = OTHER; note = 2'-O-methyladenosine-3'-phosphate
  modified_base 8: mod_base = OTHER; note = 2'-O-methyluridine-3'-phosphate
  modified_base 9: mod_base = OTHER; note = 2'-O-methyladenosine-3'-phosphate
  modified_base 10: mod_base = OTHER; note = 2'-O-methyladenosine-3'-phosphate
  modified_base 11: mod_base = OTHER; note = 2'-O-methyladenosine-3'-phosphate
  modified_base 12: mod_base = OTHER; note = 2'-fluoroadenosine-3'-phosphate
  modified_base 13: mod_base = OTHER; note = 2'-O-methyladenosine-3'-phosphate
  modified_base 14: mod_base = OTHER; note = 2'-fluorouridine-3'-phosphate
  modified_base 15: mod_base = OTHER; note = 2'-O-methylguanosine-3'-phosphate
  modified_base 16: mod_base = OTHER; note = 2'-fluorocytidine-3'-phosphate
  modified_base 17: mod_base = OTHER; note = 2'-O-methyluridine-3'-phosphate
  modified_base 18: mod_base = OTHER; note = 2'-O-methyladenosine-3'-phosphate
  modified_base 19: mod_base = OTHER; note = 2'-O-methylcytidine-3'-phosphate
  modified_base 20: mod_base = OTHER; note = 2'-O-methyladenosine-3'-phosphate
  modified_base 21: mod_base = OTHER; note = 2'-O-methyladenosine-3'-phosphorothioate
  modified_base 22: mod_base = OTHER; note = 2'-O-methyladenosine-3'-phosphorothioate
  modified_base 23: mod_base = OTHER; note = 2'-O-methyladenosine-3'-phosphate
atattaataaaaatgctacaaaa

SEQ ID NO: 23 - DNA, 21 bp, synthetic construct
  source 1..21: mol_type = other DNA
  modified_base 1: mod_base = OTHER; note = 2'-O-methylcytidine-3'-phosphorothioate
  modified_base 2: mod_base = OTHER; note = 2'-O-methyluridine-3'-phosphorothioate
  modified_base 3: mod_base = OTHER; note = 2'-O-methyladenosine-3'-phosphate
  modified_base 4: mod_base = OTHER; note = 2'-O-methylguanosine-3'-phosphate
  modified_base 5: mod_base = OTHER; note = 2'-O-methyladenosine-3'-phosphate
  modified_base 6: mod_base = OTHER; note = 2'-O-methylcytidine-3'-phosphate
  modified_base 7: mod_base = OTHER; note = 2'-fluorocytidine-3'-phosphate
  modified_base 8: mod_base = OTHER; note = 2'-O-methyluridine-3'-phosphate
  modified_base 9: mod_base = OTHER; note = 2'-fluoroguanosine-3'-phosphate
  modified_base 10: mod_base = OTHER; note = 2'-O-methyluridine-3'-phosphate
  modified_base 12: mod_base = OTHER; note = 2'-O-methyluridine-3'-phosphate
  modified_base 13: mod_base = OTHER; note = 2'-O-methyluridine-3'-phosphate
  modified_base 14: mod_base = OTHER; note = 2'-O-methylguanosine-3'-phosphate
  modified_base 15: mod_base = OTHER; note = 2'-O-methylcytidine-3'-phosphate
  modified_base 16: mod_base = OTHER; note = 2'-O-methyluridine-3'-phosphate
  modified_base 17: mod_base = OTHER; note = 2'-O-methyluridine-3'-phosphate
  modified_base 18: mod_base = OTHER; note = 2'-O-methyluridine-3'-phosphate
  modified_base 19: mod_base = OTHER; note = 2'-O-methyluridine-3'-phosphate
  modified_base 20: mod_base = OTHER; note = 2'-O-methylguanosine-3'-phosphate
  modified_base 21: mod_base = OTHER; note = 2'-O-methyluridine-3'-phosphate
  misc_feature 1..10: note = RNA
  misc_feature 11: note = DNA
  misc_feature 12..21: note = RNA
ctagacctgttttgcttttgt

SEQ ID NO: 24 - RNA, 23 nt, synthetic construct
  source 1..23: mol_type = other RNA
  modified_base 1: mod_base = OTHER; note = 2'-O-methyladenosine-3'-phosphorothioate
  modified_base 2: mod_base = OTHER; note = 2'-fluorocytidine-3'-phosphorothioate
  modified_base 3: mod_base = OTHER; note = 2'-O-methyladenosine-3'-phosphate
  modified_base 4: mod_base = OTHER; note = 2'-fluoroadenosine-3'-phosphate
  modified_base 5: mod_base = OTHER; note = 2'-fluoroadenosine-3'-phosphate
  modified_base 6: mod_base = OTHER; note = 2'-fluoroadenosine-3'-phosphate
  modified_base 7: mod_base = OTHER; note = 2'-O-methylguanosine-3'-phosphate
  modified_base 8: mod_base = OTHER; note = 2'-fluorocytidine-3'-phosphate
  modified_base 9: mod_base = OTHER; note = 2'-O-methyladenosine-3'-phosphate
  modified_base 10: mod_base = OTHER; note = 2'-fluoroadenosine-3'-phosphate
  modified_base 11: mod_base = OTHER; note = 2'-O-methyladenosine-3'-phosphate
  modified_base 12: mod_base = OTHER; note = 2'-fluoroadenosine-3'-phosphate
  modified_base 13: mod_base = OTHER; note = 2'-O-methylcytidine-3'-phosphate
  modified_base 14: mod_base = OTHER; note = 2'-fluoroadenosine-3'-phosphate
  modified_base 15: mod_base = OTHER; note = 2'-O-methylguanosine-3'-phosphate
  modified_base 16: mod_base = OTHER; note = 2'-fluoroguanosine-3'-phosphate
  modified_base 17: mod_base = OTHER; note = 2'-O-methyluridine-3'-phosphate
  modified_base 18: mod_base = OTHER; note = 2'-fluorocytidine-3'-phosphate
  modified_base 19: mod_base = OTHER; note = 2'-O-methyluridine-3'-phosphate
  modified_base 20: mod_base = OTHER; note = 2'-O-methyladenosine-3'-phosphate
  modified_base 21: mod_base = OTHER; note = 2'-O-methylguanosine-3'-phosphorothioate
  modified_base 22: mod_base = OTHER; note = 2'-O-methyladenosine-3'-phosphorothioate
  modified_base 23: mod_base = OTHER; note = 2'-O-methyladenosine-3'-phosphate
acaaaagcaaaacaggtctagaa

SEQ ID NO: 25 - RNA, 21 nt, synthetic construct
  source 1..21: mol_type = other RNA
cctcaccaagatcctgcatgt

SEQ ID NO: 26 - RNA, 21 nt, synthetic construct
  source 1..21: mol_type = other RNA
caccaagatcctgcatgtctt

SEQ ID NO: 27 - RNA, 21 nt, synthetic construct
  source 1..21: mol_type = other RNA
caagatcctgcatgtcttcca

SEQ ID NO: 28 - RNA, 21 nt, synthetic construct
  source 1..21: mol_type = other RNA
tcctggcttcctggtgaagat

SEQ ID NO: 29 - RNA, 21 nt, synthetic construct
  source 1..21: mol_type = other RNA
ctggcttcctggtgaagatga

SEQ ID NO: 30 - RNA, 21 nt, synthetic construct
  source 1..21: mol_type = other RNA
ggcttcctggtgaagatgagt

SEQ ID NO: 31 - RNA, 21 nt, synthetic construct
  source 1..21: mol_type = other RNA
gcttcctggtgaagatgagtg

SEQ ID NO: 32 - RNA, 21 nt, synthetic construct
  source 1..21: mol_type = other RNA
tggagctggccttgaagttgc

SEQ ID NO: 33 - RNA, 21 nt, synthetic construct
  source 1..21: mol_type = other RNA
agttgccccatgtcgactaca

SEQ ID NO: 34 - RNA, 21 nt, synthetic construct
  source 1..21: mol_type = other RNA
tgccccatgtcgactacatcg

SEQ ID NO: 35 - RNA, 21 nt, synthetic construct
  source 1..21: mol_type = other RNA
cggtaccgggcggatgaatac

SEQ ID NO: 36 - RNA, 21 nt, synthetic construct
  source 1..21: mol_type = other RNA
ggtaccgggcggatgaatacc

SEQ ID NO: 37 - RNA, 21 nt, synthetic construct
  source 1..21: mol_type = other RNA
ggcagcctggtggaggtgtat

SEQ ID NO: 38 - RNA, 21 nt, synthetic construct
  source 1..21: mol_type = other RNA
cagcctggtggaggtgtatct

SEQ ID NO: 39 - RNA, 21 nt, synthetic construct
  source 1..21: mol_type = other RNA
agcctggtggaggtgtatctc

SEQ ID NO: 40 - RNA, 21 nt, synthetic construct
  source 1..21: mol_type = other RNA
gcctggtggaggtgtatctcc

SEQ ID NO: 41 - RNA, 21 nt, synthetic construct
  source 1..21: mol_type = other RNA
gtatctcctagacaccagcat

SEQ ID NO: 42 - RNA, 21 nt, synthetic construct
  source 1..21: mol_type = other RNA
atctcctagacaccagcatac

SEQ ID NO: 43 - RNA, 21 nt, synthetic construct
  source 1..21: mol_type = other RNA
tcctagacaccagcatacaga

SEQ ID NO: 44 - RNA, 21 nt, synthetic construct
  source 1..21: mol_type = other RNA
ctagacaccagcatacagagt

SEQ ID NO: 45 - RNA, 21 nt, synthetic construct
  source 1..21: mol_type = other RNA
atggtcaccgacttcgagaat

SEQ ID NO: 46 - RNA, 21 nt, synthetic construct
  source 1..21: mol_type = other RNA
tcaccgacttcgagaatgtgc

SEQ ID NO: 47 - RNA, 21 nt, synthetic construct
  source 1..21: mol_type = other RNA
cctcataggcctggagtttat

SEQ ID NO: 48 - RNA, 21 nt, synthetic construct
  source 1..21: mol_type = other RNA
ggcctggagtttattcggaaa

SEQ ID NO: 49 - RNA, 21 nt, synthetic construct
  source 1..21: mol_type = other RNA
gcctggagtttattcggaaaa

SEQ ID NO: 50 - RNA, 21 nt, synthetic construct
  source 1..21: mol_type = other RNA
ttgtgtcacagagtgggacat

SEQ ID NO: 51 - RNA, 21 nt, synthetic construct
  source 1..21: mol_type = other RNA
ctgatccacttctctgccaaa

SEQ ID NO: 52 - RNA, 21 nt, synthetic construct
  source 1..21: mol_type = other RNA
atccacttctctgccaaagat

SEQ ID NO: 53 - RNA, 21 nt, synthetic construct
  source 1..21: mol_type = other RNA
tctctgccaaagatgtcatca

SEQ ID NO: 54 - RNA, 21 nt, synthetic construct
  source 1..21: mol_type = other RNA
tgtcatcaatgaggcctggtt

SEQ ID NO: 55 - RNA, 21 nt, synthetic construct
  source 1..21: mol_type = other RNA
agctgttttgcaggactgtat

SEQ ID NO: 56 - RNA, 21 nt, synthetic construct
  source 1..21: mol_type = other RNA
ctgttttgcaggactgtatgg

SEQ ID NO: 57 - RNA, 21 nt, synthetic construct
  source 1..21: mol_type = other RNA
ggactgtatggtcagcacact

SEQ ID NO: 58 - RNA, 21 nt, synthetic construct
  source 1..21: mol_type = other RNA
actgtatggtcagcacactcg

SEQ ID NO: 59 - RNA, 21 nt, synthetic construct
  source 1..21: mol_type = other RNA
cccaggtctggaatgcaaagt

SEQ ID NO: 60 - RNA, 21 nt, synthetic construct
  source 1..21: mol_type = other RNA
tctggaatgcaaagtcaagga

SEQ ID NO: 61 - RNA, 21 nt, synthetic construct
  source 1..21: mol_type = other RNA
tagacaacacgtgtgtagtca

SEQ ID NO: 62 - RNA, 21 nt, synthetic construct
  source 1..21: mol_type = other RNA
ctggggctgagctttaaaatg

SEQ ID NO: 63 - RNA, 21 nt, synthetic construct
  source 1..21: mol_type = other RNA
tggggctgagctttaaaatgg

SEQ ID NO: 64 - RNA, 21 nt, synthetic construct
  source 1..21: mol_type = other RNA
ggggctgagctttaaaatggt

SEQ ID NO: 65 - RNA, 21 nt, synthetic construct
  source 1..21: mol_type = other RNA
gggctgagctttaaaatggtt

SEQ ID NO: 66 - RNA, 21 nt, synthetic construct
  source 1..21: mol_type = other RNA
ggctgagctttaaaatggttc

SEQ ID NO: 67 - RNA, 21 nt, synthetic construct
  source 1..21: mol_type = other RNA
agctttaaaatggttccgact

SEQ ID NO: 68 - RNA, 21 nt, synthetic construct
  source 1..21: mol_type = other RNA
gctttaaaatggttccgactt

SEQ ID NO: 69 - RNA, 21 nt, synthetic construct
  source 1..21: mol_type = other RNA
tttaaaatggttccgacttgt

SEQ ID NO: 70 - RNA, 21 nt, synthetic construct
  source 1..21: mol_type = other RNA
tgctggcctggcccttgagtg

SEQ ID NO: 71 - RNA, 21 nt, synthetic construct
  source 1..21: mol_type = other RNA
gctggcctggcccttgagtgg

SEQ ID NO: 72 - RNA, 21 nt, synthetic construct
  source 1..21: mol_type = other RNA
ccctcactgtggggcatttca

SEQ ID NO: 73 - RNA, 21 nt, synthetic construct
  source 1..21: mol_type = other RNA
cactgtggggcatttcaccat

SEQ ID NO: 74 - RNA, 21 nt, synthetic construct
  source 1..21: mol_type = other RNA
ctgtggggcatttcaccattc

SEQ ID NO: 75 - RNA, 21 nt, synthetic construct
  source 1..21: mol_type = other RNA
tggggcatttcaccattcaaa

SEQ ID NO: 76 - RNA, 21 nt, synthetic construct
  source 1..21: mol_type = other RNA
gcatttcaccattcaaacagg

SEQ ID NO: 77 - RNA, 21 nt, synthetic construct
  source 1..21: mol_type = other RNA
tttattgagctcttgttccgt

SEQ ID NO: 78 - RNA, 21 nt, synthetic construct
  source 1..21: mol_type = other RNA
ccctcatctccagctaactgt

SEQ ID NO: 79 - RNA, 21 nt, synthetic construct
  source 1..21: mol_type = other RNA
actgagccagaaacgcagatt

SEQ ID NO: 80 - RNA, 21 nt, synthetic construct
  source 1..21: mol_type = other RNA
tgagccagaaacgcagattgg

SEQ ID NO: 81 - RNA, 21 nt, synthetic construct
  source 1..21: mol_type = other RNA
gaagccaagcctcttcttact

SEQ ID NO: 82 - RNA, 21 nt, synthetic construct
  source 1..21: mol_type = other RNA
agccaagcctcttcttacttc

SEQ ID NO: 83 - RNA, 21 nt, synthetic construct
  source 1..21: mol_type = other RNA
cccaagcaagcagacatttat

SEQ ID NO: 84 - RNA, 21 nt, synthetic construct
  source 1..21: mol_type = other RNA
ccaagcaagcagacatttatc

SEQ ID NO: 85 - RNA, 21 nt, synthetic construct
  source 1..21: mol_type = other RNA
ttttgggtctgtcctctctgt

SEQ ID NO: 86 - RNA, 21 nt, synthetic construct
  source 1..21: mol_type = other RNA
tctgtcctctctgttgccttt

SEQ ID NO: 87 - RNA, 21 nt, synthetic construct
  source 1..21: mol_type = other RNA
ctgtcctctctgttgcctttt

SEQ ID NO: 88 - RNA, 21 nt, synthetic construct
  source 1..21: mol_type = other RNA
tgtcctctctgttgccttttt

SEQ ID NO: 89 - RNA, 21 nt, synthetic construct
  source 1..21: mol_type = other RNA
gtcctctctgttgccttttta

SEQ ID NO: 90 - RNA, 21 nt, synthetic construct
  source 1..21: mol_type = other RNA
cctctctgttgcctttttaca

SEQ ID NO: 91 - RNA, 21 nt, synthetic construct
  source 1..21: mol_type = other RNA
gttgcctttttacagccaact

SEQ ID NO: 92 - RNA, 21 nt, synthetic construct
  source 1..21: mol_type = other RNA
tgcctttttacagccaacttt

SEQ ID NO: 93 - RNA, 21 nt, synthetic construct
  source 1..21: mol_type = other RNA
cctttttacagccaacttttc

SEQ ID NO: 94 - RNA, 21 nt, synthetic construct
  source 1..21: mol_type = other RNA
ttttacagccaacttttctag

SEQ ID NO: 95 - RNA, 21 nt, synthetic construct
  source 1..21: mol_type = other RNA
gccaacttttctagacctgtt

SEQ ID NO: 96 - RNA, 21 nt, synthetic construct
  source 1..21: mol_type = other RNA
ccaacttttctagacctgttt

SEQ ID NO: 97 - RNA, 21 nt, synthetic construct
  source 1..21: mol_type = other RNA
caacttttctagacctgtttt

SEQ ID NO: 98 - RNA, 21 nt, synthetic construct
  source 1..21: mol_type = other RNA
acttttctagacctgttttgc

SEQ ID NO: 99 - RNA, 21 nt, synthetic construct
  source 1..21: mol_type = other RNA
ttttctagacctgttttgctt

SEQ ID NO: 100 - RNA, 21 nt, synthetic construct
  source 1..21: mol_type = other RNA
tttctagacctgttttgcttt

SEQ ID NO: 101 - RNA, 21 nt, synthetic construct
  source 1..21: mol_type = other RNA
tctagacctgttttgcttttg

SEQ ID NO: 102 - RNA, 21 nt, synthetic construct
  source 1..21: mol_type = other RNA
ctagacctgttttgcttttgt

SEQ ID NO: 103 - RNA, 21 nt, synthetic construct
  source 1..21: mol_type = other RNA
tagacctgttttgcttttgta

SEQ ID NO: 104 - RNA, 21 nt, synthetic construct
  source 1..21: mol_type = other RNA
agacctgttttgcttttgtaa

SEQ ID NO: 105 - RNA, 21 nt, synthetic construct
  source 1..21: mol_type = other RNA
gacctgttttgcttttgtaac

SEQ ID NO: 106 - RNA, 21 nt, synthetic construct
  source 1..21: mol_type = other RNA
acctgttttgcttttgtaact

SEQ ID NO: 107 - RNA, 21 nt, synthetic construct
  source 1..21: mol_type = other RNA
ctgttttgcttttgtaacttg

SEQ ID NO: 108 - RNA, 21 nt, synthetic construct
  source 1..21: mol_type = other RNA
gttttgcttttgtaacttgaa

SEQ ID NO: 109 - RNA, 21 nt, synthetic construct
  source 1..21: mol_type = other RNA
tttgcttttgtaacttgaaga

SEQ ID NO: 110 - RNA, 21 nt, synthetic construct
  source 1..21: mol_type = other RNA
ttgcttttgtaacttgaagat

SEQ ID NO: 111 - RNA, 21 nt, synthetic construct
  source 1..21: mol_type = other RNA
cttttgtaacttgaagatatt

SEQ ID NO: 112 - RNA, 21 nt, synthetic construct
  source 1..21: mol_type = other RNA
ttttgtaacttgaagatattt

SEQ ID NO: 113 - RNA, 21 nt, synthetic construct
  source 1..21: mol_type = other RNA
tttgtaacttgaagatattta

SEQ ID NO: 114 - RNA, 21 nt, synthetic construct
  source 1..21: mol_type = other RNA
taacttgaagatatttattct

SEQ ID NO: 115 - RNA, 21 nt, synthetic construct
  source 1..21: mol_type = other RNA
aacttgaagatatttattctg

SEQ ID NO: 116 - RNA, 21 nt, synthetic construct
  source 1..21: mol_type = other RNA
aagatatttattctgggtttt

SEQ ID NO: 117 - RNA, 21 nt, synthetic construct
  source 1..21: mol_type = other RNA
agatatttattctgggttttg

SEQ ID NO: 118 - RNA, 21 nt, synthetic construct
  source 1..21: mol_type = other RNA
atatttattctgggttttgta

SEQ ID NO: 119 - RNA, 21 nt, synthetic construct
  source 1..21: mol_type = other RNA
tatttattctgggttttgtag

SEQ ID NO: 120 - RNA, 21 nt, synthetic construct
  source 1..21: mol_type = other RNA
ttctgggttttgtagcatttt

SEQ ID NO: 121 - RNA, 21 nt, synthetic construct
  source 1..21: mol_type = other RNA
ggttttgtagcatttttatta

SEQ ID NO: 122 - RNA, 21 nt, synthetic construct
  source 1..21: mol_type = other RNA
gttttgtagcatttttattaa

SEQ ID NO: 123 - RNA, 21 nt, synthetic construct
  source 1..21: mol_type = other RNA
ttttgtagcatttttattaat

SEQ ID NO: 124 - RNA, 21 nt, synthetic construct
  source 1..21: mol_type = other RNA
atttttattaatatggtgact

SEQ ID NO: 125 - RNA, 21 nt, synthetic construct
  source 1..21: mol_type = other RNA
tttttattaatatggtgactt

SEQ ID NO: 126 - RNA, 21 nt, synthetic construct
  source 1..21: mol_type = other RNA
ttttgcttttgtaacttgaag

SEQ ID NO: 127 - RNA, 21 nt, synthetic construct
  source 1..21: mol_type = other RNA
ttgtagcatttttattaatat

SEQ ID NO: 128 - RNA, 21 nt, synthetic construct
  source 1..21: mol_type = other RNA
  modified_base 1: mod_base = OTHER; note = 2'-O-methylcytidine-3'-phosphorothioate
  modified_base 2: mod_base = OTHER; note = 2'-O-methylcytidine-3'-phosphorothioate
  modified_base 3: mod_base = OTHER; note = 2'-O-methyluridine-3'-phosphate
  modified_base 4: mod_base = OTHER; note = 2'-O-methylcytidine-3'-phosphate
  modified_base 5: mod_base = OTHER; note = 2'-O-methyladenosine-3'-phosphate
  modified_base 6: mod_base = OTHER; note = 2'-O-methylcytidine-3'-phosphate
  modified_base 7: mod_base = OTHER; note = 2'-fluorocytidine-3'-phosphate
  modified_base 8: mod_base = OTHER; note = 2'-O-methyladenosine-3'-phosphate
  modified_base 9: mod_base = OTHER; note = 2'-fluoroadenosine-3'-phosphate
  modified_base 10: mod_base = OTHER; note = 2'-fluoroguanosine-3'-phosphate
  modified_base 11: mod_base = OTHER; note = 2'-fluoroadenosine-3'-phosphate
  modified_base 12: mod_base = OTHER; note = 2'-O-methyluridine-3'-phosphate
  modified_base 13: mod_base = OTHER; note = 2'-O-methylcytidine-3'-phosphate
  modified_base 14: mod_base = OTHER; note = 2'-O-methylcytidine-3'-phosphate
  modified_base 15: mod_base = OTHER; note = 2'-O-methyluridine-3'-phosphate
  modified_base 16: mod_base = OTHER; note = 2'-O-methylguanosine-3'-phosphate
  modified_base 17: mod_base = OTHER; note = 2'-O-methylcytidine-3'-phosphate
  modified_base 18: mod_base = OTHER; note = 2'-O-methyladenosine-3'-phosphate
  modified_base 19: mod_base = OTHER; note = 2'-O-methyluridine-3'-phosphate
  modified_base 20: mod_base = OTHER; note = 2'-O-methylguanosine-3'-phosphate
  modified_base 21: mod_base = OTHER; note = 2'-O-methyluridine-3'-phosphate
cctcaccaagatcctgcatgt

SEQ ID NO: 129 - RNA, 21 nt, synthetic construct
  source 1..21: mol_type = other RNA
  modified_base 1: mod_base = OTHER; note = 2'-O-methylcytidine-3'-phosphorothioate
  modified_base 2: mod_base = OTHER; note = 2'-O-methyladenosine-3'-phosphorothioate
  modified_base 3: mod_base = OTHER; note = 2'-O-methylcytidine-3'-phosphate
  modified_base 4: mod_base = OTHER; note = 2'-O-methylcytidine-3'-phosphate
  modified_base 5: mod_base = OTHER; note = 2'-O-methyladenosine-3'-phosphate
  modified_base 6: mod_base = OTHER; note = 2'-O-methyladenosine-3'-phosphate
  modified_base 7: mod_base = OTHER; note = 2'-fluoroguanosine-3'-phosphate
  modified_base 8: mod_base = OTHER; note = 2'-O-methyladenosine-3'-phosphate
  modified_base 9: mod_base = OTHER; note = 2'-fluorouridine-3'-phosphate
  modified_base 10: mod_base = OTHER; note = 2'-fluorocytidine-3'-phosphate
  modified_base 11: mod_base = OTHER; note = 2'-fluorocytidine-3'-phosphate
  modified_base 12: mod_base = OTHER; note = 2'-O-methyluridine-3'-phosphate
  modified_base 13: mod_base = OTHER; note = 2'-O-methylguanosine-3'-phosphate
  modified_base 14: mod_base = OTHER; note = 2'-O-methylcytidine-3'-phosphate
  modified_base 15: mod_base = OTHER; note = 2'-O-methyladenosine-3'-phosphate
  modified_base 16: mod_base = OTHER; note = 2'-O-methyluridine-3'-phosphate
  modified_base 17: mod_base = OTHER; note = 2'-O-methylguanosine-3'-phosphate
  modified_base 18: mod_base = OTHER; note = 2'-O-methyluridine-3'-phosphate
  modified_base 19: mod_base = OTHER; note = 2'-O-methylcytidine-3'-phosphate
  modified_base 20: mod_base = OTHER; note = 2'-O-methyluridine-3'-phosphate
  modified_base 21: mod_base = OTHER; note = 2'-O-methyluridine-3'-phosphate
caccaagatcctgcatgtctt

SEQ ID NO: 130 - RNA, 21 nt, synthetic construct
  source 1..21: mol_type = other RNA
  modified_base 1: mod_base = OTHER; note = 2'-O-methylcytidine-3'-phosphorothioate
  modified_base 2: mod_base = OTHER; note = 2'-O-methyladenosine-3'-phosphorothioate
  modified_base 3: mod_base = OTHER; note = 2'-O-methyladenosine-3'-phosphate
  modified_base 4: mod_base = OTHER; note = 2'-O-methylguanosine-3'-phosphate
  modified_base 5: mod_base = OTHER; note = 2'-O-methyladenosine-3'-phosphate
  modified_base 6: mod_base = OTHER; note = 2'-O-methyluridine-3'-phosphate
  modified_base 7: mod_base = OTHER; note = 2'-fluorocytidine-3'-phosphate
  modified_base 8: mod_base = OTHER; note = 2'-O-methylcytidine-3'-phosphate
  modified_base 9: mod_base = OTHER; note = 2'-fluorouridine-3'-phosphate
  modified_base 10: mod_base = OTHER; note = 2'-fluoroguanosine-3'-phosphate
  modified_base 11: mod_base = OTHER; note = 2'-fluorocytidine-3'-phosphate
  modified_base 12: mod_base = OTHER; note = 2'-O-methyladenosine-3'-phosphate
  modified_base 13: mod_base = OTHER; note = 2'-O-methyluridine-3'-phosphate
  modified_base 14: mod_base = OTHER; note = 2'-O-methylguanosine-3'-phosphate
  modified_base 15: mod_base = OTHER; note = 2'-O-methyluridine-3'-phosphate
  modified_base 16: mod_base = OTHER; note = 2'-O-methylcytidine-3'-phosphate
  modified_base 17: mod_base = OTHER; note = 2'-O-methyluridine-3'-phosphate
  modified_base 18: mod_base = OTHER; note = 2'-O-methyluridine-3'-phosphate
  modified_base 19: mod_base = OTHER; note = 2'-O-methylcytidine-3'-phosphate
  modified_base 20: mod_base = OTHER; note = 2'-O-methylcytidine-3'-phosphate
  modified_base 21: mod_base = OTHER; note = 2'-O-methyladenosine-3'-phosphate
caagatcctgcatgtcttcca

SEQ ID NO: 131 - RNA, 21 nt, synthetic construct
  source 1..21: mol_type = other RNA
  modified_base 1: mod_base = OTHER; note = 2'-O-methyluridine-3'-phosphorothioate
  modified_base 2: mod_base = OTHER; note = 2'-O-methylcytidine-3'-phosphorothioate
  modified_base 3: mod_base = OTHER; note = 2'-O-methylcytidine-3'-phosphate
  modified_base 4: mod_base = OTHER; note = 2'-O-methyluridine-3'-phosphate
  modified_base 5: mod_base = OTHER; note = 2'-O-methylguanosine-3'-phosphate
  modified_base 6: mod_base = OTHER; note = 2'-O-methylguanosine-3'-phosphate
  modified_base 7: mod_base = OTHER; note = 2'-fluorocytidine-3'-phosphate
  modified_base 8: mod_base = OTHER; note = 2'-O-methyluridine-3'-phosphate
  modified_base 9: mod_base = OTHER; note = 2'-fluorouridine-3'-phosphate
  modified_base 10: mod_base = OTHER; note = 2'-fluorocytidine-3'-phosphate
  modified_base 11: mod_base = OTHER; note = 2'-fluorocytidine-3'-phosphate
  modified_base 12: mod_base = OTHER; note = 2'-O-methyluridine-3'-phosphate
  modified_base 13: mod_base = OTHER; note = 2'-O-methylguanosine-3'-phosphate
  modified_base 14: mod_base = OTHER; note = 2'-O-methylguanosine-3'-phosphate
  modified_base 15: mod_base = OTHER; note = 2'-O-methyluridine-3'-phosphate
  modified_base 16: mod_base = OTHER; note = 2'-O-methylguanosine-3'-phosphate
  modified_base 17: mod_base = OTHER; note = 2'-O-methyladenosine-3'-phosphate
  modified_base 18: mod_base = OTHER; note = 2'-O-methyladenosine-3'-phosphate
  modified_base 19: mod_base = OTHER; note = 2'-O-methylguanosine-3'-phosphate
  modified_base 20: mod_base = OTHER; note = 2'-O-methyladenosine-3'-phosphate
  modified_base 21: mod_base = OTHER; note = 2'-O-methyluridine-3'-phosphate
tcctggcttcctggtgaagat

SEQ ID NO: 132 - RNA, 21 nt, synthetic construct
  source 1..21: mol_type = other RNA
  modified_base 1: mod_base = OTHER; note = 2'-O-methylcytidine-3'-phosphorothioate
  modified_base 2: mod_base = OTHER; note = 2'-O-methyluridine-3'-phosphorothioate
  modified_base 3: mod_base = OTHER; note = 2'-O-methylguanosine-3'-phosphate
  modified_base 4: mod_base = OTHER; note = 2'-O-methylguanosine-3'-phosphate
  modified_base 5: mod_base = OTHER; note = 2'-O-methylcytidine-3'-phosphate
  modified_base 6: mod_base = OTHER; note = 2'-O-methyluridine-3'-phosphate
  modified_base 7: mod_base = OTHER; note = 2'-fluorouridine-3'-phosphate
  modified_base 8: mod_base = OTHER; note = 2'-O-methylcytidine-3'-phosphate
  modified_base 9: mod_base = OTHER; note = 2'-fluorocytidine-3'-phosphate
  modified_base 10: mod_base = OTHER; note = 2'-fluorouridine-3'-phosphate
  modified_base 11: mod_base = OTHER; note = 2'-fluoroguanosine-3'-phosphate
  modified_base 12: mod_base = OTHER; note = 2'-O-methylguanosine-3'-phosphate
  modified_base 13: mod_base = OTHER; note = 2'-O-methyluridine-3'-phosphate
  modified_base 14: mod_base = OTHER; note = 2'-O-methylguanosine-3'-phosphate
  modified_base 15: mod_base = OTHER; note = 2'-O-methyladenosine-3'-phosphate
  modified_base 16: mod_base = OTHER; note = 2'-O-methyladenosine-3'-phosphate
  modified_base 17: mod_base = OTHER; note = 2'-O-methylguanosine-3'-phosphate
  modified_base 18: mod_base = OTHER; note = 2'-O-methyladenosine-3'-phosphate
  modified_base 19: mod_base = OTHER; note = 2'-O-methyluridine-3'-phosphate
  modified_base 20: mod_base = OTHER; note = 2'-O-methylguanosine-3'-phosphate
  modified_base 21: mod_base = OTHER; note = 2'-O-methyladenosine-3'-phosphate
ctggcttcctggtgaagatga

SEQ ID NO: 133 - RNA, 21 nt, synthetic construct
  source 1..21: mol_type = other RNA
  modified_base 1: mod_base = OTHER; note = 2'-O-methylguanosine-3'-phosphorothioate
  modified_base 2: mod_base = OTHER; note = 2'-O-methylguanosine-3'-phosphorothioate
  modified_base 3: mod_base = OTHER; note = 2'-O-methylcytidine-3'-phosphate
  modified_base 4: mod_base = OTHER; note = 2'-O-methyluridine-3'-phosphate
  modified_base 5: mod_base = OTHER; note = 2'-O-methyluridine-3'-phosphate
  modified_base 6: mod_base = OTHER; note = 2'-O-methylcytidine-3'-phosphate
  modified_base 7: mod_base = OTHER; note = 2'-fluorocytidine-3'-phosphate
  modified_base 8: mod_base = OTHER; note = 2'-O-methyluridine-3'-phosphate
  modified_base 9: mod_base = OTHER; note = 2'-fluoroguanosine-3'-phosphate
  modified_base 10: mod_base = OTHER; note = 2'-fluoroguanosine-3'-phosphate
  modified_base 11: mod_base = OTHER; note = 2'-fluorouridine-3'-phosphate
  modified_base 12: mod_base = OTHER; note = 2'-O-methylguanosine-3'-phosphate
  modified_base 13: mod_base = OTHER; note = 2'-O-methyladenosine-3'-phosphate
  modified_base 14: mod_base = OTHER; note = 2'-O-methyladenosine-3'-phosphate
  modified_base 15: mod_base = OTHER; note = 2'-O-methylguanosine-3'-phosphate
  modified_base 16: mod_base = OTHER; note = 2'-O-methyladenosine-3'-phosphate
  modified_base 17: mod_base = OTHER; note = 2'-O-methyluridine-3'-phosphate
  modified_base 18: mod_base = OTHER; note = 2'-O-methylguanosine-3'-phosphate
  modified_base 19: mod_base = OTHER; note = 2'-O-methyladenosine-3'-phosphate
  modified_base 20: mod_base = OTHER; note = 2'-O-methylguanosine-3'-phosphate
  modified_base 21: mod_base = OTHER; note = 2'-O-methyluridine-3'-phosphate
ggcttcctggtgaagatgagt

SEQ ID NO: 134 - RNA, 21 nt, synthetic construct
  source 1..21: mol_type = other RNA
  modified_base 1: mod_base = OTHER; note = 2'-O-methylguanosine-3'-phosphorothioate
  modified_base 2: mod_base = OTHER; note = 2'-O-methylcytidine-3'-phosphorothioate
  modified_base 3: mod_base = OTHER; note = 2'-O-methyluridine-3'-phosphate
  modified_base 4: mod_base = OTHER; note = 2'-O-methyluridine-3'-phosphate
  modified_base 5: mod_base = OTHER; note = 2'-O-methylcytidine-3'-phosphate
  modified_base 6: mod_base = OTHER; note = 2'-O-methylcytidine-3'-phosphate
  modified_base 7: mod_base = OTHER; note = 2'-fluorouridine-3'-phosphate
  modified_base 8: mod_base = OTHER; note = 2'-O-methylguanosine-3'-phosphate
  modified_base 9: mod_base = OTHER; note = 2'-fluoroguanosine-3'-phosphate
  modified_base 10: mod_base = OTHER; note = 2'-fluorouridine-3'-phosphate
  modified_base 11: mod_base = OTHER; note = 2'-fluoroguanosine-3'-phosphate
  modified_base 12: mod_base = OTHER; note = 2'-O-methyladenosine-3'-phosphate
  modified_base 13: mod_base = OTHER; note = 2'-O-methyladenosine-3'-phosphate
  modified_base 14: mod_base = OTHER; note = 2'-O-methylguanosine-3'-phosphate
  modified_base 15: mod_base = OTHER; note = 2'-O-methyladenosine-3'-phosphate
  modified_base 16: mod_base = OTHER; note = 2'-O-methyluridine-3'-phosphate
  modified_base 17: mod_base = OTHER; note = 2'-O-methylguanosine-3'-phosphate
  modified_base 18: mod_base = OTHER; note = 2'-O-methyladenosine-3'-phosphate
  modified_base 19: mod_base = OTHER; note = 2'-O-methylguanosine-3'-phosphate
  modified_base 20: mod_base = OTHER; note = 2'-O-methyluridine-3'-phosphate
  modified_base 21: mod_base = OTHER; note = 2'-O-methylguanosine-3'-phosphate
gcttcctggtgaagatgagtg

SEQ ID NO: 135 - RNA, 21 nt, synthetic construct
  source 1..21: mol_type = other RNA
  modified_base 1: mod_base = OTHER; note = 2'-O-methyluridine-3'-phosphorothioate
  modified_base 2: mod_base = OTHER; note = 2'-O-methylguanosine-3'-phosphorothioate
  modified_base 3: mod_base = OTHER; note = 2'-O-methylguanosine-3'-phosphate
  modified_base 4: mod_base = OTHER; note = 2'-O-methyladenosine-3'-phosphate
  modified_base 5: mod_base = OTHER; note = 2'-O-methylguanosine-3'-phosphate
  modified_base 6: mod_base = OTHER; note = 2'-O-methylcytidine-3'-phosphate
  modified_base 7: mod_base = OTHER; note = 2'-fluorouridine-3'-phosphate
  modified_base 8: mod_base = OTHER; note = 2'-O-methylguanosine-3'-phosphate
  modified_base 9: mod_base = OTHER; note = 2'-fluoroguanosine-3'-phosphate
  modified_base 10: mod_base = OTHER; note = 2'-fluorocytidine-3'-phosphate
  modified_base 11: mod_base = OTHER; note = 2'-fluorocytidine-3'-phosphate
  modified_base 12: mod_base = OTHER; note = 2'-O-methyluridine-3'-phosphate
  modified_base 13: mod_base = OTHER; note = 2'-O-methyluridine-3'-phosphate
  modified_base 14: mod_base = OTHER; note = 2'-O-methylguanosine-3'-phosphate
  modified_base 15: mod_base = OTHER; note = 2'-O-methyladenosine-3'-phosphate
  modified_base 16: mod_base = OTHER; note = 2'-O-methyladenosine-3'-phosphate
  modified_base 17: mod_base = OTHER; note = 2'-O-methylguanosine-3'-phosphate
  modified_base 18: mod_base = OTHER; note = 2'-O-methyluridine-3'-phosphate
  modified_base 19: mod_base = OTHER; note = 2'-O-methyluridine-3'-phosphate
  modified_base 20: mod_base = OTHER; note = 2'-O-methylguanosine-3'-phosphate
  modified_base 21: mod_base = OTHER; note = 2'-O-methylcytidine-3'-phosphate
tggagctggccttgaagttgc

SEQ ID NO: 136 - RNA, 21 nt, synthetic construct
  source 1..21: mol_type = other RNA
  modified_base 1: mod_base = OTHER; note = 2'-O-methyladenosine-3'-phosphorothioate
  modified_base 2: mod_base = OTHER; note = 2'-O-methylguanosine-3'-phosphorothioate
  modified_base 3: mod_base = OTHER; note = 2'-O-methyluridine-3'-phosphate
  modified_base 4: mod_base = OTHER; note = 2'-O-methyluridine-3'-phosphate
  modified_base 5: mod_base = OTHER; note = 2'-O-methylguanosine-3'-phosphate
  modified_base 6: mod_base = OTHER; note = 2'-O-methylcytidine-3'-phosphate
  modified_base 7: mod_base = OTHER; note = 2'-fluorocytidine-3'-phosphate
  modified_base 8: mod_base = OTHER; note = 2'-O-methylcytidine-3'-phosphate
  modified_base 9: mod_base = OTHER; note = 2'-fluorocytidine-3'-phosphate
  modified_base 10: mod_base = OTHER; note = 2'-fluoroadenosine-3'-phosphate
  modified_base 11: mod_base = OTHER; note = 2'-fluorouridine-3'-phosphate
  modified_base 12: mod_base = OTHER; note = 2'-O-methylguanosine-3'-phosphate
  modified_base 13: mod_base = OTHER; note = 2'-O-methyluridine-3'-phosphate
  modified_base 14: mod_base = OTHER; note = 2'-O-methylcytidine-3'-phosphate
  modified_base 15: mod_base = OTHER; note = 2'-O-methylguanosine-3'-phosphate
  modified_base 16: mod_base = OTHER; note = 2'-O-methyladenosine-3'-phosphate
  modified_base 17: mod_base = OTHER; note = 2'-O-methylcytidine-3'-phosphate
  modified_base 18: mod_base = OTHER; note = 2'-O-methyluridine-3'-phosphate
  modified_base 19: mod_base = OTHER; note = 2'-O-methyladenosine-3'-phosphate
  modified_base 20: mod_base = OTHER; note = 2'-O-methylcytidine-3'-phosphate
  modified_base 21: mod_base = OTHER; note = 2'-O-methyladenosine-3'-phosphate
agttgccccatgtcgactaca

SEQ ID NO: 137 - RNA, 21 nt, synthetic construct
  source 1..21: mol_type = other RNA
  modified_base 1: mod_base = OTHER; note = 2'-O-methyluridine-3'-phosphorothioate
  modified_base 2: mod_base = OTHER; note = 2'-O-methylguanosine-3'-phosphorothioate
  modified_base 3: mod_base = OTHER; note = 2'-O-methylcytidine-3'-phosphate
  modified_base 4: mod_base = OTHER; note = 2'-O-methylcytidine-3'-phosphate
  modified_base 5: mod_base = OTHER; note = 2'-O-methylcytidine-3'-phosphate
  modified_base 6: mod_base = OTHER; note = 2'-O-methylcytidine-3'-phosphate
  modified_base 7: mod_base = OTHER; note = 2'-fluoroadenosine-3'-phosphate
  modified_base 8: mod_base = OTHER; note = 2'-O-methyluridine-3'-phosphate
  modified_base 9: mod_base = OTHER; note = 2'-fluoroguanosine-3'-phosphate
  modified_base 10: mod_base = OTHER; note = 2'-fluorouridine-3'-phosphate
  modified_base 11: mod_base = OTHER; note = 2'-fluorocytidine-3'-phosphate
  modified_base 12: mod_base = OTHER; note = 2'-O-methylguanosine-3'-phosphate
  modified_base 13: mod_base = OTHER; note = 2'-O-methyladenosine-3'-phosphate
  modified_base 14: mod_base = OTHER; note = 2'-O-methylcytidine-3'-phosphate
  modified_base 15: mod_base = OTHER; note = 2'-O-methyluridine-3'-phosphate
  modified_base 16: mod_base = OTHER; note = 2'-O-methyladenosine-3'-phosphate
  modified_base 17: mod_base = OTHER; note = 2'-O-methylcytidine-3'-phosphate
  modified_base 18: mod_base = OTHER; note = 2'-O-methyladenosine-3'-phosphate
  modified_base 19: mod_base = OTHER; note = 2'-O-methyluridine-3'-phosphate
  modified_base 20: mod_base = OTHER; note = 2'-O-methylcytidine-3'-phosphate
  modified_base 21: mod_base = OTHER; note = 2'-O-methylguanosine-3'-phosphate
tgccccatgtcgactacatcg

SEQ ID NO: 138 - RNA, 21 nt, synthetic construct
  source 1..21: mol_type = other RNA
  modified_base 1: mod_base = OTHER; note = 2'-O-methylcytidine-3'-phosphorothioate
  modified_base 2: mod_base = OTHER; note = 2'-O-methylguanosine-3'-phosphorothioate
  modified_base 3: mod_base = OTHER; note = 2'-O-methylguanosine-3'-phosphate
  modified_base 4: mod_base = OTHER; note = 2'-O-methyluridine-3'-phosphate
  modified_base 5: mod_base = OTHER; note = 2'-O-methyladenosine-3'-phosphate
  modified_base 6: mod_base = OTHER; note = 2'-O-methylcytidine-3'-phosphate
  modified_base 7: mod_base = OTHER; note = 2'-fluorocytidine-3'-phosphate
  modified_base 8: mod_base = OTHER; note = 2'-O-methylguanosine-3'-phosphate
  modified_base 9: mod_base = OTHER; note = 2'-fluoroguanosine-3'-phosphate
  modified_base 10: mod_base = OTHER; note = 2'-fluoroguanosine-3'-phosphate
  modified_base 11: mod_base = OTHER; note = 2'-fluorocytidine-3'-phosphate
  modified_base 12: mod_base = OTHER; note = 2'-O-methylguanosine-3'-phosphate
  modified_base 13: mod_base = OTHER; note = 2'-O-methylguanosine-3'-phosphate
  modified_base 14: mod_base = OTHER; note = 2'-O-methyladenosine-3'-phosphate
  modified_base 15: mod_base = OTHER; note = 2'-O-methyluridine-3'-phosphate
  modified_base 16: mod_base = OTHER; note = 2'-O-methylguanosine-3'-phosphate
  modified_base 17: mod_base = OTHER; note = 2'-O-methyladenosine-3'-phosphate
  modified_base 18: mod_base = OTHER; note = 2'-O-methyladenosine-3'-phosphate
  modified_base 19: mod_base = OTHER; note = 2'-O-methyluridine-3'-phosphate
  modified_base 20: mod_base = OTHER; note = 2'-O-methyladenosine-3'-phosphate
  modified_base 21: mod_base = OTHER; note = 2'-O-methylcytidine-3'-phosphate
cggtaccgggcggatgaatac

SEQ ID NO: 139 - RNA, 21 nt, synthetic construct
  source 1..21: mol_type = other RNA
  modified_base 1: mod_base = OTHER; note = 2'-O-methylguanosine-3'-phosphorothioate
  modified_base 2: mod_base = OTHER; note = 2'-O-methylguanosine-3'-phosphorothioate
  modified_base 3: mod_base = OTHER; note = 2'-O-methyluridine-3'-phosphate
  modified_base 4: mod_base = OTHER; note = 2'-O-methyladenosine-3'-phosphate
  modified_base 5: mod_base = OTHER; note = 2'-O-methylcytidine-3'-phosphate
  modified_base 6: mod_base = OTHER; note = 2'-O-methylcytidine-3'-phosphate
  modified_base 7: mod_base = OTHER; note = 2'-fluoroguanosine-3'-phosphate
  modified_base 8: mod_base = OTHER; note = 2'-O-methylguanosine-3'-phosphate
  modified_base 9: mod_base = OTHER; note = 2'-fluoroguanosine-3'-phosphate
  modified_base 10: mod_base = OTHER; note = 2'-fluorocytidine-3'-phosphate
  modified_base 11: mod_base = OTHER; note = 2'-fluoroguanosine-3'-phosphate
  modified_base 12: mod_base = OTHER; note = 2'-O-methylguanosine-3'-phosphate
  modified_base 13: mod_base = OTHER; note = 2'-O-methyladenosine-3'-phosphate
  modified_base 14: mod_base = OTHER; note = 2'-O-methyluridine-3'-phosphate
  modified_base 15: mod_base = OTHER; note = 2'-O-methylguanosine-3'-phosphate
  modified_base 16: mod_base = OTHER; note = 2'-O-methyladenosine-3'-phosphate
  modified_base 17: mod_base = OTHER; note = 2'-O-methyladenosine-3'-phosphate
  modified_base 18: mod_base = OTHER; note = 2'-O-methyluridine-3'-phosphate
  modified_base 19: mod_base = OTHER; note = 2'-O-methyladenosine-3'-phosphate
  modified_base 20: mod_base = OTHER; note = 2'-O-methylcytidine-3'-phosphate
  modified_base 21: mod_base = OTHER; note = 2'-O-methylcytidine-3'-phosphate
ggtaccgggcggatgaatacc

SEQ ID NO: 140 - RNA, 21 nt, synthetic construct
  source 1..21: mol_type = other RNA
  modified_base 1: mod_base = OTHER; note = 2'-O-methylguanosine-3'-phosphorothioate
  modified_base 2: mod_base = OTHER; note = 2'-O-methylguanosine-3'-phosphorothioate
  modified_base 3: mod_base = OTHER; note = 2'-O-methylcytidine-3'-phosphate
  modified_base 4: mod_base = OTHER; note = 2'-O-methyladenosine-3'-phosphate
  modified_base 5: mod_base = OTHER; note = 2'-O-methylguanosine-3'-phosphate
  modified_base 6: mod_base = OTHER; note = 2'-O-methylcytidine-3'-phosphate
  modified_base 7: mod_base = OTHER; note = 2'-fluorocytidine-3'-phosphate
  modified_base 8: mod_base = OTHER; note = 2'-O-methyluridine-3'-phosphate
  modified_base 9: mod_base = OTHER; note = 2'-fluoroguanosine-3'-phosphate
  modified_base 10: mod_base = OTHER; note = 2'-fluoroguanosine-3'-phosphate
  modified_base 11: mod_base = OTHER; note = 2'-fluorouridine-3'-phosphate
  modified_base 12: mod_base = OTHER; note = 2'-O-methylguanosine-3'-phosphate
  modified_base 13: mod_base = OTHER; note = 2'-O-methylguanosine-3'-phosphate
  modified_base 14: mod_base = OTHER; note = 2'-O-methyladenosine-3'-phosphate
  modified_base 15: mod_base = OTHER; note = 2'-O-methylguanosine-3'-phosphate
  modified_base 16: mod_base = OTHER; note = 2'-O-methylguanosine-3'-phosphate
  modified_base 17: mod_base = OTHER; note = 2'-O-methyluridine-3'-phosphate
  modified_base 18: mod_base = OTHER; note = 2'-O-methylguanosine-3'-phosphate
  modified_base 19: mod_base = OTHER; note = 2'-O-methyluridine-3'-phosphate
  modified_base 20: mod_base = OTHER; note = 2'-O-methyladenosine-3'-phosphate
  modified_base 21: mod_base = OTHER; note = 2'-O-methyluridine-3'-phosphate
ggcagcctggtggaggtgtat

SEQ ID NO: 141 - RNA, 21 nt, synthetic construct
  source 1..21: mol_type = other RNA
  modified_base 1: mod_base = OTHER; note = 2'-O-methylcytidine-3'-phosphorothioate
  modified_base 2: mod_base = OTHER; note = 2'-O-methyladenosine-3'-phosphorothioate
  modified_base 3: mod_base = OTHER; note = 2'-O-methylguanosine-3'-phosphate
  modified_base 4: mod_base = OTHER; note = 2'-O-methylcytidine-3'-phosphate
  modified_base 5: mod_base = OTHER; note = 2'-O-methylcytidine-3'-phosphate
  modified_base 6: mod_base = OTHER; note = 2'-O-methyluridine-3'-phosphate
  modified_base 7: mod_base = OTHER; note = 2'-fluoroguanosine-3'-phosphate
  modified_base 8: mod_base = OTHER; note = 2'-O-methylguanosine-3'-phosphate
  modified_base 9: mod_base = OTHER; note = 2'-fluorouridine-3'-phosphate
  modified_base 10: mod_base = OTHER; note = 2'-fluoroguanosine-3'-phosphate
  modified_base 11: mod_base = OTHER; note = 2'-fluoroguanosine-3'-phosphate
  modified_base 12: mod_base = OTHER; note = 2'-O-methyladenosine-3'-phosphate
  modified_base 13: mod_base = OTHER; note = 2'-O-methylguanosine-3'-phosphate
  modified_base 14: mod_base = OTHER; note = 2'-O-methylguanosine-3'-phosphate
  modified_base 15: mod_base = OTHER; note = 2'-O-methyluridine-3'-phosphate
  modified_base 16: mod_base = OTHER; note = 2'-O-methylguanosine-3'-phosphate
  modified_base 17: mod_base = OTHER; note = 2'-O-methyluridine-3'-phosphate
  modified_base 18: mod_base = OTHER; note = 2'-O-methyladenosine-3'-phosphate
  modified_base 19: mod_base = OTHER; note = 2'-O-methyluridine-3'-phosphate
  modified_base 20: mod_base = OTHER; note = 2'-O-methylcytidine-3'-phosphate
  modified_base 21: mod_base = OTHER; note = 2'-O-methyluridine-3'-phosphate
cagcctggtggaggtgtatct

SEQ ID NO: 142 - RNA, 21 nt, synthetic construct
  source 1..21: mol_type = other RNA
  modified_base 1: mod_base = OTHER; note = 2'-O-methyladenosine-3'-phosphorothioate
  modified_base 2: mod_base = OTHER; note = 2'-O-methylguanosine-3'-phosphorothioate
  modified_base 3: mod_base = OTHER; note = 2'-O-methylcytidine-3'-phosphate
  modified_base 4: mod_base = OTHER; note = 2'-O-methylcytidine-3'-phosphate
  modified_base 5: mod_base = OTHER; note = 2'-O-methyluridine-3'-phosphate
  modified_base 6: mod_base = OTHER; note = 2'-O-methylguanosine-3'-phosphate
  modified_base 7: mod_base = OTHER; note = 2'-fluoroguanosine-3'-phosphate
  modified_base 8: mod_base = OTHER; note = 2'-O-methyluridine-3'-phosphate
  modified_base 9: mod_base = OTHER; note = 2'-fluoroguanosine-3'-phosphate
  modified_base 10: mod_base = OTHER; note = 2'-fluoroguanosine-3'-phosphate
  modified_base 11: mod_base = OTHER; note = 2'-fluoroadenosine-3'-phosphate
  modified_base 12: mod_base = OTHER; note = 2'-O-methylguanosine-3'-phosphate
  modified_base 13: mod_base = OTHER; note = 2'-O-methylguanosine-3'-phosphate
  modified_base 14: mod_base = OTHER; note = 2'-O-methyluridine-3'-phosphate
  modified_base 15: mod_base = OTHER; note = 2'-O-methylguanosine-3'-phosphate
  modified_base 16: mod_base = OTHER; note = 2'-O-methyluridine-3'-phosphate
  modified_base 17: mod_base = OTHER; note = 2'-O-methyladenosine-3'-phosphate
  modified_base 18: mod_base = OTHER; note = 2'-O-methyluridine-3'-phosphate
  modified_base 19: mod_base = OTHER; note = 2'-O-methylcytidine-3'-phosphate
  modified_base 20: mod_base = OTHER; note = 2'-O-methyluridine-3'-phosphate
  modified_base 21: mod_base = OTHER; note = 2'-O-methylcytidine-3'-phosphate
agcctggtggaggtgtatctc

SEQ ID NO: 143 - RNA, 21 nt, synthetic construct
  source 1..21: mol_type = other RNA
  modified_base 1: mod_base = OTHER; note = 2'-O-methylguanosine-3'-phosphorothioate
  modified_base 2: mod_base = OTHER; note = 2'-O-methylcytidine-3'-phosphorothioate
  modified_base 3: mod_base = OTHER; note = 2'-O-methylcytidine-3'-phosphate
  modified_base 4: mod_base = OTHER; note = 2'-O-methyluridine-3'-phosphate
  modified_base 5: mod_base = OTHER; note = 2'-O-methylguanosine-3'-phosphate
  modified_base 6: mod_base = OTHER; note = 2'-O-methylguanosine-3'-phosphate
  modified_base 7: mod_base = OTHER; note = 2'-fluorouridine-3'-phosphate
  modified_base 8: mod_base = OTHER; note = 2'-O-methylguanosine-3'-phosphate
  modified_base 9: mod_base = OTHER; note = 2'-fluoroguanosine-3'-phosphate
  modified_base 10: mod_base = OTHER; note = 2'-fluoroadenosine-3'-phosphate
  modified_base 11: mod_base = OTHER; note = 2'-fluoroguanosine-3'-phosphate
  modified_base 12: mod_base = OTHER; note = 2'-O-methylguanosine-3'-phosphate
  modified_base 13: mod_base = OTHER; note = 2'-O-methyluridine-3'-phosphate
  modified_base 14: mod_base = OTHER; note = 2'-O-methylguanosine-3'-phosphate
  modified_base 15: mod_base = OTHER; note = 2'-O-methyluridine-3'-phosphate
  modified_base 16: mod_base = OTHER; note = 2'-O-methyladenosine-3'-phosphate
  modified_base 17: mod_base = OTHER; note = 2'-O-methyluridine-3'-phosphate
  modified_base 18: mod_base = OTHER; note = 2'-O-methylcytidine-3'-phosphate
  modified_base 19: mod_base = OTHER; note = 2'-O-methyluridine-3'-phosphate
  modified_base 20: mod_base = OTHER; note = 2'-O-methylcytidine-3'-phosphate
  modified_base 21: mod_base = OTHER; note = 2'-O-methylcytidine-3'-phosphate
gcctggtggaggtgtatctcc

SEQ ID NO: 144 - RNA, 21 nt, synthetic construct
  source 1..21: mol_type = other RNA
  modified_base 1: mod_base = OTHER; note = 2'-O-methylguanosine-3'-phosphorothioate
  modified_base 2: mod_base = OTHER; note = 2'-O-methyluridine-3'-phosphorothioate
  modified_base 3: mod_base = OTHER; note = 2'-O-methyladenosine-3'-phosphate
  modified_base 4: mod_base = OTHER; note = 2'-O-methyluridine-3'-phosphate
  modified_base 5: mod_base = OTHER; note = 2'-O-methylcytidine-3'-phosphate
  modified_base 6: mod_base = OTHER; note = 2'-O-methyluridine-3'-phosphate
  modified_base 7: mod_base = OTHER; note = 2'-fluorocytidine-3'-phosphate
  modified_base 8: mod_base = OTHER; note = 2'-O-methylcytidine-3'-phosphate
  modified_base 9: mod_base = OTHER; note = 2'-fluorouridine-3'-phosphate
  modified_base 10: mod_base = OTHER; note = 2'-fluoroadenosine-3'-phosphate
  modified_base 11: mod_base = OTHER; note = 2'-fluoroguanosine-3'-phosphate
  modified_base 12: mod_base = OTHER; note = 2'-O-methyladenosine-3'-phosphate
  modified_base 13: mod_base = OTHER; note = 2'-O-methylcytidine-3'-phosphate
  modified_base 14: mod_base = OTHER; note = 2'-O-methyladenosine-3'-phosphate
  modified_base 15: mod_base = OTHER; note = 2'-O-methylcytidine-3'-phosphate
  modified_base 16: mod_base = OTHER; note = 2'-O-methylcytidine-3'-phosphate
  modified_base 17: mod_base = OTHER; note = 2'-O-methyladenosine-3'-phosphate
  modified_base 18: mod_base = OTHER; note = 2'-O-methylguanosine-3'-phosphate
  modified_base 19: mod_base = OTHER; note = 2'-O-methylcytidine-3'-phosphate
  modified_base 20: mod_base = OTHER; note = 2'-O-methyladenosine-3'-phosphate
  modified_base 21: mod_base = OTHER; note = 2'-O-methyluridine-3'-phosphate
gtatctcctagacaccagcat

SEQ ID NO: 145 - RNA, 21 nt, synthetic construct
  source 1..21: mol_type = other RNA
  modified_base 1: mod_base = OTHER; note = 2'-O-methyladenosine-3'-phosphorothioate
  modified_base 2: mod_base = OTHER; note = 2'-O-methyluridine-3'-phosphorothioate
  modified_base 3: mod_base = OTHER; note = 2'-O-methylcytidine-3'-phosphate
  modified_base 4: mod_base = OTHER; note = 2'-O-methyluridine-3'-phosphate
  modified_base 5: mod_base = OTHER; note = 2'-O-methylcytidine-3'-phosphate
  modified_base 6: mod_base = OTHER; note = 2'-O-methylcytidine-3'-phosphate
  modified_base 7: mod_base = OTHER; note = 2'-fluorouridine-3'-phosphate
  modified_base 8: mod_base = OTHER; note = 2'-O-methyladenosine-3'-phosphate
  modified_base 9: mod_base = OTHER; note = 2'-fluoroguanosine-3'-phosphate
  modified_base 10: mod_base = OTHER; note = 2'-fluoroadenosine-3'-phosphate
  modified_base 11: mod_base = OTHER; note = 2'-fluorocytidine-3'-phosphate
  modified_base 12: mod_base = OTHER; note = 2'-O-methyladenosine-3'-phosphate
  modified_base 13: mod_base = OTHER; note = 2'-O-methylcytidine-3'-phosphate
  modified_base 14: mod_base = OTHER; note = 2'-O-methylcytidine-3'-phosphate
  modified_base 15: mod_base = OTHER; note = 2'-O-methyladenosine-3'-phosphate
  modified_base 16: mod_base = OTHER; note = 2'-O-methylguanosine-3'-phosphate
  modified_base 17: mod_base = OTHER; note = 2'-O-methylcytidine-3'-phosphate
  modified_base 18: mod_base = OTHER; note = 2'-O-methyladenosine-3'-phosphate
  modified_base 19: mod_base = OTHER; note = 2'-O-methyluridine-3'-phosphate
  modified_base 20: mod_base = OTHER; note = 2'-O-methyladenosine-3'-phosphate
  modified_base 21: mod_base = OTHER; note = 2'-O-methylcytidine-3'-phosphate
atctcctagacaccagcatac

SEQ ID NO: 146 - RNA, 21 nt, synthetic construct
  source 1..21: mol_type = other RNA
  modified_base 1: mod_base = OTHER; note = 2'-O-methyluridine-3'-phosphorothioate
  modified_base 2: mod_base = OTHER; note = 2'-O-methylcytidine-3'-phosphorothioate
  modified_base 3: mod_base = OTHER; note = 2'-O-methylcytidine-3'-phosphate
  modified_base 4: mod_base = OTHER; note = 2'-O-methyluridine-3'-phosphate
  modified_base 5: mod_base = OTHER; note = 2'-O-methyladenosine-3'-phosphate
  modified_base 6: mod_base = OTHER; note = 2'-O-methylguanosine-3'-phosphate
  modified_base 7: mod_base = OTHER; note = 2'-fluoroadenosine-3'-phosphate
  modified_base 8: mod_base = OTHER; note = 2'-O-methylcytidine-3'-phosphate
  modified_base 9: mod_base = OTHER; note = 2'-fluoroadenosine-3'-phosphate
  modified_base 10: mod_base = OTHER; note = 2'-fluorocytidine-3'-phosphate
  modified_base 11: mod_base = OTHER; note = 2'-fluorocytidine-3'-phosphate
  modified_base 12: mod_base = OTHER; note = 2'-O-methyladenosine-3'-phosphate
  modified_base 13: mod_base = OTHER; note = 2'-O-methylguanosine-3'-phosphate
  modified_base 14: mod_base = OTHER; note = 2'-O-methylcytidine-3'-phosphate
  modified_base 15: mod_base = OTHER; note = 2'-O-methyladenosine-3'-phosphate
  modified_base 16: mod_base = OTHER; note = 2'-O-methyluridine-3'-phosphate
  modified_base 17: mod_base = OTHER; note = 2'-O-methyladenosine-3'-phosphate
  modified_base 18: mod_base = OTHER; note = 2'-O-methylcytidine-3'-phosphate
  modified_base 19: mod_base = OTHER; note = 2'-O-methyladenosine-3'-phosphate
  modified_base 20: mod_base = OTHER; note = 2'-O-methylguanosine-3'-phosphate
  modified_base 21: mod_base = OTHER; note = 2'-O-methyladenosine-3'-phosphate
tcctagacaccagcatacaga

SEQ ID NO: 147 - RNA, 21 nt, synthetic construct
  source 1..21: mol_type = other RNA
  modified_base 1: mod_base = OTHER; note = 2'-O-methylcytidine-3'-phosphorothioate
  modified_base 2: mod_base = OTHER; note = 2'-O-methyluridine-3'-phosphorothioate
  modified_base 3: mod_base = OTHER; note = 2'-O-methyladenosine-3'-phosphate
  modified_base 4: mod_base = OTHER; note = 2'-O-methylguanosine-3'-phosphate
  modified_base 5: mod_base = OTHER; note = 2'-O-methyladenosine-3'-phosphate
  modified_base 6: mod_base = OTHER; note = 2'-O-methylcytidine-3'-phosphate
  modified_base 7: mod_base = OTHER; note = 2'-fluoroadenosine-3'-phosphate
  modified_base 8: mod_base = OTHER; note = 2'-O-methylcytidine-3'-phosphate
  modified_base 9: mod_base = OTHER; note = 2'-fluorocytidine-3'-phosphate
  modified_base 10: mod_base = OTHER; note = 2'-fluoroadenosine-3'-phosphate
  modified_base 11: mod_base = OTHER; note = 2'-fluoroguanosine-3'-phosphate
  modified_base 12: mod_base = OTHER; note = 2'-O-methylcytidine-3'-phosphate
  modified_base 13: mod_base = OTHER; note = 2'-O-methyladenosine-3'-phosphate
  modified_base 14: mod_base = OTHER; note = 2'-O-methyluridine-3'-phosphate
  modified_base 15: mod_base = OTHER; note = 2'-O-methyladenosine-3'-phosphate
  modified_base 16: mod_base = OTHER; note = 2'-O-methylcytidine-3'-phosphate
  modified_base 17: mod_base = OTHER; note = 2'-O-methyladenosine-3'-phosphate
  modified_base 18: mod_base = OTHER; note = 2'-O-methylguanosine-3'-phosphate
  modified_base 19: mod_base = OTHER; note = 2'-O-methyladenosine-3'-phosphate
  modified_base 20: mod_base = OTHER; note = 2'-O-methylguanosine-3'-phosphate
  modified_base 21: mod_base = OTHER; note = 2'-O-methyluridine-3'-phosphate
ctagacaccagcatacagagt

SEQ ID NO: 148 - RNA, 21 nt, synthetic construct
  source 1..21: mol_type = other RNA
  modified_base 1: mod_base = OTHER; note = 2'-O-methyladenosine-3'-phosphorothioate
  modified_base 2: mod_base = OTHER; note = 2'-O-methyluridine-3'-phosphorothioate
  modified_base 3: mod_base = OTHER; note = 2'-O-methylguanosine-3'-phosphate
  modified_base 4: mod_base = OTHER; note = 2'-O-methylguanosine-3'-phosphate
  modified_base 5: mod_base = OTHER; note = 2'-O-methyluridine-3'-phosphate
  modified_base 6: mod_base = OTHER; note = 2'-O-methylcytidine-3'-phosphate
  modified_base 7: mod_base = OTHER; note = 2'-fluoroadenosine-3'-phosphate
  modified_base 8: mod_base = OTHER; note = 2'-O-methylcytidine-3'-phosphate
  modified_base 9: mod_base = OTHER; note = 2'-fluorocytidine-3'-phosphate
  modified_base 10: mod_base = OTHER; note = 2'-fluoroguanosine-3'-phosphate
  modified_base 11: mod_base = OTHER; note = 2'-fluoroadenosine-3'-phosphate
  modified_base 12: mod_base = OTHER; note = 2'-O-methylcytidine-3'-phosphate
  modified_base 13: mod_base = OTHER; note = 2'-O-methyluridine-3'-phosphate
  modified_base 14: mod_base = OTHER; note = 2'-O-methyluridine-3'-phosphate
  modified_base 15: mod_base = OTHER; note = 2'-O-methylcytidine-3'-phosphate
  modified_base 16: mod_base = OTHER; note = 2'-O-methylguanosine-3'-phosphate
  modified_base 17: mod_base = OTHER; note = 2'-O-methyladenosine-3'-phosphate
  modified_base 18: mod_base = OTHER; note = 2'-O-methylguanosine-3'-phosphate
  modified_base 19: mod_base = OTHER; note = 2'-O-methyladenosine-3'-phosphate
  modified_base 20: mod_base = OTHER; note = 2'-O-methyladenosine-3'-phosphate
  modified_base 21: mod_base = OTHER; note = 2'-O-methyluridine-3'-phosphate
atggtcaccgacttcgagaat

SEQ ID NO: 149 - RNA, 21 nt, synthetic construct
  source 1..21: mol_type = other RNA
  modified_base 1: mod_base = OTHER; note = 2'-O-methyluridine-3'-phosphorothioate
  modified_base 2: mod_base = OTHER; note = 2'-O-methylcytidine-3'-phosphorothioate
  modified_base 3: mod_base = OTHER; note = 2'-O-methyladenosine-3'-phosphate
  modified_base 4: mod_base = OTHER; note = 2'-O-methylcytidine-3'-phosphate
  modified_base 5: mod_base = OTHER; note = 2'-O-methylcytidine-3'-phosphate
  modified_base 6: mod_base = OTHER; note = 2'-O-methylguanosine-3'-phosphate
  modified_base 7: mod_base = OTHER; note = 2'-fluoroadenosine-3'-phosphate
  modified_base 8: mod_base = OTHER; note = 2'-O-methylcytidine-3'-phosphate
  modified_base 9: mod_base = OTHER; note = 2'-fluorouridine-3'-phosphate
  modified_base 10: mod_base = OTHER; note = 2'-fluorouridine-3'-phosphate
  modified_base 11: mod_base = OTHER; note = 2'-fluorocytidine-3'-phosphate
  modified_base 12: mod_base = OTHER; note = 2'-O-methylguanosine-3'-phosphate
  modified_base 13: mod_base = OTHER; note = 2'-O-methyladenosine-3'-phosphate
  modified_base 14: mod_base = OTHER; note = 2'-O-methylguanosine-3'-phosphate
  modified_base 15: mod_base = OTHER; note = 2'-O-methyladenosine-3'-phosphate
  modified_base 16: mod_base = OTHER; note = 2'-O-methyladenosine-3'-phosphate
  modified_base 17: mod_base = OTHER; note = 2'-O-methyluridine-3'-phosphate
  modified_base 18: mod_base = OTHER; note = 2'-O-methylguanosine-3'-phosphate
  modified_base 19: mod_base = OTHER; note = 2'-O-methyluridine-3'-phosphate
  modified_base 20: mod_base = OTHER; note = 2'-O-methylguanosine-3'-phosphate
  modified_base 21: mod_base = OTHER; note = 2'-O-methylcytidine-3'-phosphate
tcaccgacttcgagaatgtgc

SEQ ID NO: 150 - RNA, 21 nt, synthetic construct
  source 1..21: mol_type = other RNA
  modified_base 1: mod_base = OTHER; note = 2'-O-methylcytidine-3'-phosphorothioate
  modified_base 2: mod_base = OTHER; note = 2'-O-methylcytidine-3'-phosphorothioate
  modified_base 3: mod_base = OTHER; note = 2'-O-methyluridine-3'-phosphate
  modified_base 4: mod_base = OTHER; note = 2'-O-methylcytidine-3'-phosphate
  modified_base 5: mod_base = OTHER; note = 2'-O-methyladenosine-3'-phosphate
  modified_base 6: mod_base = OTHER; note = 2'-O-methyluridine-3'-phosphate
  modified_base 7: mod_base = OTHER; note = 2'-fluoroadenosine-3'-phosphate
  modified_base 8: mod_base = OTHER; note = 2'-O-methylguanosine-3'-phosphate
  modified_base 9: mod_base = OTHER; note = 2'-fluoroguanosine-3'-phosphate
  modified_base 10: mod_base = OTHER; note = 2'-fluorocytidine-3'-phosphate
  modified_base 11: mod_base = OTHER; note = 2'-fluorocytidine-3'-phosphate
  modified_base 12: mod_base = OTHER; note = 2'-O-methyluridine-3'-phosphate
  modified_base 13: mod_base = OTHER; note = 2'-O-methylguanosine-3'-phosphate
  modified_base 14: mod_base = OTHER; note = 2'-O-methylguanosine-3'-phosphate
  modified_base 15: mod_base = OTHER; note = 2'-O-methyladenosine-3'-phosphate
  modified_base 16: mod_base = OTHER; note = 2'-O-methylguanosine-3'-phosphate
  modified_base 17: mod_base = OTHER; note = 2'-O-methyluridine-3'-phosphate
  modified_base 18: mod_base = OTHER; note = 2'-O-methyluridine-3'-phosphate
  modified_base 19: mod_base = OTHER; note = 2'-O-methyluridine-3'-phosphate
  modified_base 20: mod_base = OTHER; note = 2'-O-methyladenosine-3'-phosphate
  modified_base 21: mod_base = OTHER; note = 2'-O-methyluridine-3'-phosphate
cctcataggcctggagtttat

SEQ ID NO: 151 - RNA, 21 nt, synthetic construct
  source 1..21: mol_type = other RNA
  modified_base 1: mod_base = OTHER; note = 2'-O-methylguanosine-3'-phosphorothioate
  modified_base 2: mod_base = OTHER; note = 2'-O-methylguanosine-3'-phosphorothioate
  modified_base 3: mod_base = OTHER; note = 2'-O-methylcytidine-3'-phosphate
  modified_base 4: mod_base = OTHER; note = 2'-O-methylcytidine-3'-phosphate
  modified_base 5: mod_base = OTHER; note = 2'-O-methyluridine-3'-phosphate
  modified_base 6: mod_base = OTHER; note = 2'-O-methylguanosine-3'-phosphate
  modified_base 7: mod_base = OTHER; note = 2'-fluoroguanosine-3'-phosphate
  modified_base 8: mod_base = OTHER; note = 2'-O-methyladenosine-3'-phosphate
  modified_base 9: mod_base = OTHER; note = 2'-fluoroguanosine-3'-phosphate
  modified_base 10: mod_base = OTHER; note = 2'-fluorouridine-3'-phosphate
  modified_base 11: mod_base = OTHER; note = 2'-fluorouridine-3'-phosphate
  modified_base 12: mod_base = OTHER; note = 2'-O-methyluridine-3'-phosphate
  modified_base 13: mod_base = OTHER; note = 2'-O-methyladenosine-3'-phosphate
  modified_base 14: mod_base = OTHER; note = 2'-O-methyluridine-3'-phosphate
  modified_base 15: mod_base = OTHER; note = 2'-O-methyluridine-3'-phosphate
  modified_base 16: mod_base = OTHER; note = 2'-O-methylcytidine-3'-phosphate
  modified_base 17: mod_base = OTHER; note = 2'-O-methylguanosine-3'-phosphate
  modified_base 18: mod_base = OTHER; note = 2'-O-methylguanosine-3'-phosphate
  modified_base 19: mod_base = OTHER; note = 2'-O-methyladenosine-3'-phosphate
  modified_base 20: mod_base = OTHER; note = 2'-O-methyladenosine-3'-phosphate
  modified_base 21: mod_base = OTHER; note = 2'-O-methyladenosine-3'-phosphate
ggcctggagtttattcggaaa

SEQ ID NO: 152 - RNA, 21 nt, synthetic construct
  source 1..21: mol_type = other RNA
  modified_base 1: mod_base = OTHER; note = 2'-O-methylguanosine-3'-phosphorothioate
  modified_base 2: mod_base = OTHER; note = 2'-O-methylcytidine-3'-phosphorothioate
  modified_base 3: mod_base = OTHER; note = 2'-O-methylcytidine-3'-phosphate
  modified_base 4: mod_base = OTHER; note = 2'-O-methyluridine-3'-phosphate
  modified_base 5: mod_base = OTHER; note = 2'-O-methylguanosine-3'-phosphate
  modified_base 6: mod_base = OTHER; note = 2'-O-methylguanosine-3'-phosphate
  modified_base 7: mod_base = OTHER; note = 2'-fluoroadenosine-3'-phosphate
  modified_base 8: mod_base = OTHER; note = 2'-O-methylguanosine-3'-phosphate
  modified_base 9: mod_base = OTHER; note = 2'-fluorouridine-3'-phosphate
  modified_base 10: mod_base = OTHER; note = 2'-fluorouridine-3'-phosphate
  modified_base 11: mod_base = OTHER; note = 2'-fluorouridine-3'-phosphate
  modified_base 12: mod_base = OTHER; note = 2'-O-methyladenosine-3'-phosphate
  modified_base 13: mod_base = OTHER; note = 2'-O-methyluridine-3'-phosphate
  modified_base 14: mod_base = OTHER; note = 2'-O-methyluridine-3'-phosphate
  modified_base 15: mod_base = OTHER; note = 2'-O-methylcytidine-3'-phosphate
  modified_base 16: mod_base = OTHER; note = 2'-O-methylguanosine-3'-phosphate
  modified_base 17: mod_base = OTHER; note = 2'-O-methylguanosine-3'-phosphate
  modified_base 18: mod_base = OTHER; note = 2'-O-methyladenosine-3'-phosphate
  modified_base 19: mod_base = OTHER; note = 2'-O-methyladenosine-3'-phosphate
  modified_base 20: mod_base = OTHER; note = 2'-O-methyladenosine-3'-phosphate
  modified_base 21: mod_base = OTHER; note = 2'-O-methyladenosine-3'-phosphate
gcctggagtttattcggaaaa

SEQ ID NO: 153 - RNA, 21 nt, synthetic construct
  source 1..21: mol_type = other RNA
  modified_base 1: mod_base = OTHER; note = 2'-O-methyluridine-3'-phosphorothioate
  modified_base 2: mod_base = OTHER; note = 2'-O-methyluridine-3'-phosphorothioate
  modified_base 3: mod_base = OTHER; note = 2'-O-methylguanosine-3'-phosphate
  modified_base 4: mod_base = OTHER; note = 2'-O-methyluridine-3'-phosphate
  modified_base 5: mod_base = OTHER; note = 2'-O-methylguanosine-3'-phosphate
  modified_base 6: mod_base = OTHER; note = 2'-O-methyluridine-3'-phosphate
  modified_base 7: mod_base = OTHER; note = 2'-fluorocytidine-3'-phosphate
  modified_base 8: mod_base = OTHER; note = 2'-O-methyladenosine-3'-phosphate
  modified_base 9: mod_base = OTHER; note = 2'-fluorocytidine-3'-phosphate
  modified_base 10: mod_base = OTHER; note = 2'-fluoroadenosine-3'-phosphate
  modified_base 11: mod_base = OTHER; note = 2'-fluoroguanosine-3'-phosphate
  modified_base 12: mod_base = OTHER; note = 2'-O-methyladenosine-3'-phosphate
  modified_base 13: mod_base = OTHER; note = 2'-O-methylguanosine-3'-phosphate
  modified_base 14: mod_base = OTHER; note = 2'-O-methyluridine-3'-phosphate
  modified_base 15: mod_base = OTHER; note = 2'-O-methylguanosine-3'-phosphate
  modified_base 16: mod_base = OTHER; note = 2'-O-methylguanosine-3'-phosphate
  modified_base 17: mod_base = OTHER; note = 2'-O-methylguanosine-3'-phosphate
  modified_base 18: mod_base = OTHER; note = 2'-O-methyladenosine-3'-phosphate
  modified_base 19: mod_base = OTHER; note = 2'-O-methylcytidine-3'-phosphate
  modified_base 20: mod_base = OTHER; note = 2'-O-methyladenosine-3'-phosphate
  modified_base 21: mod_base = OTHER; note = 2'-O-methyluridine-3'-phosphate
ttgtgtcacagagtgggacat

SEQ ID NO: 154 - RNA, 21 nt, synthetic construct
  source 1..21: mol_type = other RNA
  modified_base 1: mod_base = OTHER; note = 2'-O-methylcytidine-3'-phosphorothioate
  modified_base 2: mod_base = OTHER; note = 2'-O-methyluridine-3'-phosphorothioate
  modified_base 3: mod_base = OTHER; note = 2'-O-methylguanosine-3'-phosphate
  modified_base 4: mod_base = OTHER; note = 2'-O-methyladenosine-3'-phosphate
  modified_base 5: mod_base = OTHER; note = 2'-O-methyluridine-3'-phosphate
  modified_base 6: mod_base = OTHER; note = 2'-O-methylcytidine-3'-phosphate
  modified_base 7: mod_base = OTHER; note = 2'-fluorocytidine-3'-phosphate
  modified_base 8: mod_base = OTHER; note = 2'-O-methyladenosine-3'-phosphate
  modified_base 9: mod_base = OTHER; note = 2'-fluorocytidine-3'-phosphate
  modified_base 10: mod_base = OTHER; note = 2'-fluorouridine-3'-phosphate
  modified_base 11: mod_base = OTHER; note = 2'-fluorouridine-3'-phosphate
  modified_base 12: mod_base = OTHER; note = 2'-O-methylcytidine-3'-phosphate
  modified_base 13: mod_base = OTHER; note = 2'-O-methyluridine-3'-phosphate
  modified_base 14: mod_base = OTHER; note = 2'-O-methylcytidine-3'-phosphate
  modified_base 15: mod_base = OTHER; note = 2'-O-methyluridine-3'-phosphate
  modified_base 16: mod_base = OTHER; note = 2'-O-methylguanosine-3'-phosphate
  modified_base 17: mod_base = OTHER; note = 2'-O-methylcytidine-3'-phosphate
  modified_base 18: mod_base = OTHER; note = 2'-O-methylcytidine-3'-phosphate
  modified_base 19: mod_base = OTHER; note = 2'-O-methyladenosine-3'-phosphate
  modified_base 20: mod_base = OTHER; note = 2'-O-methyladenosine-3'-phosphate
  modified_base 21: mod_base = OTHER; note = 2'-O-methyladenosine-3'-phosphate
ctgatccacttctctgccaaa

SEQ ID NO: 155 - RNA, 21 nt, synthetic construct
  source 1..21: mol_type = other RNA
  modified_base 1: mod_base = OTHER; note = 2'-O-methyladenosine-3'-phosphorothioate
  modified_base 2: mod_base = OTHER; note = 2'-O-methyluridine-3'-phosphorothioate
  modified_base 3: mod_base = OTHER; note = 2'-O-methylcytidine-3'-phosphate
  modified_base 4: mod_base = OTHER; note = 2'-O-methylcytidine-3'-phosphate
  modified_base 5: mod_base = OTHER; note = 2'-O-methyladenosine-3'-phosphate
  modified_base 6: mod_base = OTHER; note = 2'-O-methylcytidine-3'-phosphate
  modified_base 7: mod_base = OTHER; note = 2'-fluorouridine-3'-phosphate
  modified_base 8: mod_base = OTHER; note = 2'-O-methyluridine-3'-phosphate
  modified_base 9: mod_base = OTHER; note = 2'-fluorocytidine-3'-phosphate
  modified_base 10: mod_base = OTHER; note = 2'-fluorouridine-3'-phosphate
  modified_base 11: mod_base = OTHER; note = 2'-fluorocytidine-3'-phosphate
  modified_base 12: mod_base = OTHER; note = 2'-O-methyluridine-3'-phosphate
  modified_base 13: mod_base = OTHER; note = 2'-O-methylguanosine-3'-phosphate
  modified_base 14: mod_base = OTHER; note = 2'-O-methylcytidine-3'-phosphate
  modified_base 15: mod_base = OTHER; note = 2'-O-methylcytidine-3'-phosphate
  modified_base 16: mod_base = OTHER; note = 2'-O-methyladenosine-3'-phosphate
  modified_base 17: mod_base = OTHER; note = 2'-O-methyladenosine-3'-phosphate
  modified_base 18: mod_base = OTHER; note = 2'-O-methyladenosine-3'-phosphate
  modified_base 19: mod_base = OTHER; note = 2'-O-methylguanosine-3'-phosphate
  modified_base 20: mod_base = OTHER; note = 2'-O-methyladenosine-3'-phosphate
  modified_base 21: mod_base = OTHER; note = 2'-O-methyluridine-3'-phosphate
atccacttctctgccaaagat

SEQ ID NO: 156 - RNA, 21 nt, synthetic construct
  source 1..21: mol_type = other RNA
  modified_base 1: mod_base = OTHER; note = 2'-O-methyluridine-3'-phosphorothioate
  modified_base 2: mod_base = OTHER; note = 2'-O-methylcytidine-3'-phosphorothioate
  modified_base 3: mod_base = OTHER; note = 2'-O-methyluridine-3'-phosphate
  modified_base 4: mod_base = OTHER; note = 2'-O-methylcytidine-3'-phosphate
  modified_base 5: mod_base = OTHER; note = 2'-O-methyluridine-3'-phosphate
  modified_base 6: mod_base = OTHER; note = 2'-O-methylguanosine-3'-phosphate
  modified_base 7: mod_base = OTHER; note = 2'-fluorocytidine-3'-phosphate
  modified_base 8: mod_base = OTHER; note = 2'-O-methylcytidine-3'-phosphate
  modified_base 9: mod_base = OTHER; note = 2'-fluoroadenosine-3'-phosphate
  modified_base 10: mod_base = OTHER; note = 2'-fluoroadenosine-3'-phosphate
  modified_base 11: mod_base = OTHER; note = 2'-fluoroadenosine-3'-phosphate
  modified_base 12: mod_base = OTHER; note = 2'-O-methylguanosine-3'-phosphate
  modified_base 13: mod_base = OTHER; note = 2'-O-methyladenosine-3'-phosphate
  modified_base 14: mod_base = OTHER; note = 2'-O-methyluridine-3'-phosphate
  modified_base 15: mod_base = OTHER; note = 2'-O-methylguanosine-3'-phosphate
  modified_base 16: mod_base = OTHER; note = 2'-O-methyluridine-3'-phosphate
  modified_base 17: mod_base = OTHER; note = 2'-O-methylcytidine-3'-phosphate
  modified_base 18: mod_base = OTHER; note = 2'-O-methyladenosine-3'-phosphate
  modified_base 19: mod_base = OTHER; note = 2'-O-methyluridine-3'-phosphate
  modified_base 20: mod_base = OTHER; note = 2'-O-methylcytidine-3'-phosphate
  modified_base 21: mod_base = OTHER; note = 2'-O-methyladenosine-3'-phosphate
tctctgccaaagatgtcatca

SEQ ID NO: 157 - RNA, 21 nt, synthetic construct
  source 1..21: mol_type = other RNA
  modified_base 1: mod_base = OTHER; note = 2'-O-methyluridine-3'-phosphorothioate
  modified_base 2: mod_base = OTHER; note = 2'-O-methylguanosine-3'-phosphorothioate
  modified_base 3: mod_base = OTHER; note = 2'-O-methyluridine-3'-phosphate
  modified_base 4: mod_base = OTHER; note = 2'-O-methylcytidine-3'-phosphate
  modified_base 5: mod_base = OTHER; note = 2'-O-methyladenosine-3'-phosphate
  modified_base 6: mod_base = OTHER; note = 2'-O-methyluridine-3'-phosphate
  modified_base 7: mod_base = OTHER; note = 2'-fluorocytidine-3'-phosphate
  modified_base 8: mod_base = OTHER; note = 2'-O-methyladenosine-3'-phosphate
  modified_base 9: mod_base = OTHER; note = 2'-fluoroadenosine-3'-phosphate
  modified_base 10: mod_base = OTHER; note = 2'-fluorouridine-3'-phosphate
  modified_base 11: mod_base = OTHER; note = 2'-fluoroguanosine-3'-phosphate
  modified_base 12: mod_base = OTHER; note = 2'-O-methyladenosine-3'-phosphate
  modified_base 13: mod_base = OTHER; note = 2'-O-methylguanosine-3'-phosphate
  modified_base 14: mod_base = OTHER; note = 2'-O-methylguanosine-3'-phosphate
  modified_base 15: mod_base = OTHER; note = 2'-O-methylcytidine-3'-phosphate
  modified_base 16: mod_base = OTHER; note = 2'-O-methylcytidine-3'-phosphate
  modified_base 17: mod_base = OTHER; note = 2'-O-methyluridine-3'-phosphate
  modified_base 18: mod_base = OTHER; note = 2'-O-methylguanosine-3'-phosphate
  modified_base 19: mod_base = OTHER; note = 2'-O-methylguanosine-3'-phosphate
  modified_base 20: mod_base = OTHER; note = 2'-O-methyluridine-3'-phosphate
  modified_base 21: mod_base = OTHER; note = 2'-O-methyluridine-3'-phosphate
tgtcatcaatgaggcctggtt

SEQ ID NO: 158 - RNA, 21 nt, synthetic construct
  source 1..21: mol_type = other RNA
  modified_base 1: mod_base = OTHER; note = 2'-O-methyladenosine-3'-phosphorothioate
  modified_base 2: mod_base = OTHER; note = 2'-O-methylguanosine-3'-phosphorothioate
  modified_base 3: mod_base = OTHER; note = 2'-O-methylcytidine-3'-phosphate
  modified_base 4: mod_base = OTHER; note = 2'-O-methyluridine-3'-phosphate
  modified_base 5: mod_base = OTHER; note = 2'-O-methylguanosine-3'-phosphate
  modified_base 6: mod_base = OTHER; note = 2'-O-methyluridine-3'-phosphate
  modified_base 7: mod_base = OTHER; note = 2'-fluorouridine-3'-phosphate
  modified_base 8: mod_base = OTHER; note = 2'-O-methyluridine-3'-phosphate
  modified_base 9: mod_base = OTHER; note = 2'-fluorouridine-3'-phosphate
  modified_base 10: mod_base = OTHER; note = 2'-fluoroguanosine-3'-phosphate
  modified_base 11: mod_base = OTHER; note = 2'-fluorocytidine-3'-phosphate
  modified_base 12: mod_base = OTHER; note = 2'-O-methyladenosine-3'-phosphate
  modified_base 13: mod_base = OTHER; note = 2'-O-methylguanosine-3'-phosphate
  modified_base 14: mod_base = OTHER; note = 2'-O-methylguanosine-3'-phosphate
  modified_base 15: mod_base = OTHER; note = 2'-O-methyladenosine-3'-phosphate
  modified_base 16: mod_base = OTHER; note = 2'-O-methylcytidine-3'-phosphate
  modified_base 17: mod_base = OTHER; note = 2'-O-methyluridine-3'-phosphate
  modified_base 18: mod_base = OTHER; note = 2'-O-methylguanosine-3'-phosphate
  modified_base 19: mod_base = OTHER; note = 2'-O-methyluridine-3'-phosphate
  modified_base 20: mod_base = OTHER; note = 2'-O-methyladenosine-3'-phosphate
  modified_base 21: mod_base = OTHER; note = 2'-O-methyluridine-3'-phosphate
agctgttttgcaggactgtat

SEQ ID NO: 159 - RNA, 21 nt, synthetic construct
  source 1..21: mol_type = other RNA
  modified_base 1: mod_base = OTHER; note = 2'-O-methylcytidine-3'-phosphorothioate
  modified_base 2: mod_base = OTHER; note = 2'-O-methyluridine-3'-phosphorothioate
  modified_base 3: mod_base = OTHER; note = 2'-O-methylguanosine-3'-phosphate
  modified_base 4: mod_base = OTHER; note = 2'-O-methyluridine-3'-phosphate
  modified_base 5: mod_base = OTHER; note = 2'-O-methyluridine-3'-phosphate
  modified_base 6: mod_base = OTHER; note = 2'-O-methyluridine-3'-phosphate
  modified_base 7: mod_base = OTHER; note = 2'-fluorouridine-3'-phosphate
  modified_base 8: mod_base = OTHER; note = 2'-O-methylguanosine-3'-phosphate
  modified_base 9: mod_base = OTHER; note = 2'-fluorocytidine-3'-phosphate
  modified_base 10: mod_base = OTHER; note = 2'-fluoroadenosine-3'-phosphate
  modified_base 11: mod_base = OTHER; note = 2'-fluoroguanosine-3'-phosphate
  modified_base 12: mod_base = OTHER; note = 2'-O-methylguanosine-3'-phosphate
  modified_base 13: mod_base = OTHER; note = 2'-O-methyladenosine-3'-phosphate
  modified_base 14: mod_base = OTHER; note = 2'-O-methylcytidine-3'-phosphate
  modified_base 15: mod_base = OTHER; note = 2'-O-methyluridine-3'-phosphate
  modified_base 16: mod_base = OTHER; note = 2'-O-methylguanosine-3'-phosphate
  modified_base 17: mod_base = OTHER; note = 2'-O-methyluridine-3'-phosphate
  modified_base 18: mod_base = OTHER; note = 2'-O-methyladenosine-3'-phosphate
  modified_base 19: mod_base = OTHER; note = 2'-O-methyluridine-3'-phosphate
  modified_base 20: mod_base = OTHER; note = 2'-O-methylguanosine-3'-phosphate
  modified_base 21: mod_base = OTHER; note = 2'-O-methylguanosine-3'-phosphate
ctgttttgcaggactgtatgg

SEQ ID NO: 160 - RNA, 21 nt, synthetic construct
  source 1..21: mol_type = other RNA
  modified_base 1: mod_base = OTHER; note = 2'-O-methylguanosine-3'-phosphorothioate
  modified_base 2: mod_base = OTHER; note = 2'-O-methylguanosine-3'-phosphorothioate
  modified_base 3: mod_base = OTHER; note = 2'-O-methyladenosine-3'-phosphate
  modified_base 4: mod_base = OTHER; note = 2'-O-methylcytidine-3'-phosphate
  modified_base 5: mod_base = OTHER; note = 2'-O-methyluridine-3'-phosphate
  modified_base 6: mod_base = OTHER; note = 2'-O-methylguanosine-3'-phosphate
  modified_base 7: mod_base = OTHER; note = 2'-fluorouridine-3'-phosphate
  modified_base 8: mod_base = OTHER; note = 2'-O-methyladenosine-3'-phosphate
  modified_base 9: mod_base = OTHER; note = 2'-fluorouridine-3'-phosphate
  modified_base 10: mod_base = OTHER; note = 2'-fluoroguanosine-3'-phosphate
  modified_base 11: mod_base = OTHER; note = 2'-fluoroguanosine-3'-phosphate
  modified_base 12: mod_base = OTHER; note = 2'-O-methyluridine-3'-phosphate
  modified_base 13: mod_base = OTHER; note = 2'-O-methylcytidine-3'-phosphate
  modified_base 14: mod_base = OTHER; note = 2'-O-methyladenosine-3'-phosphate
  modified_base 15: mod_base = OTHER; note = 2'-O-methylguanosine-3'-phosphate
  modified_base 16: mod_base = OTHER; note = 2'-O-methylcytidine-3'-phosphate
  modified_base 17: mod_base = OTHER; note = 2'-O-methyladenosine-3'-phosphate
  modified_base 18: mod_base = OTHER; note = 2'-O-methylcytidine-3'-phosphate
  modified_base 19: mod_base = OTHER; note = 2'-O-methyladenosine-3'-phosphate
  modified_base 20: mod_base = OTHER; note = 2'-O-methylcytidine-3'-phosphate
  modified_base 21: mod_base = OTHER; note = 2'-O-methyluridine-3'-phosphate
ggactgtatggtcagcacact

SEQ ID NO: 161 - RNA, 21 nt, synthetic construct
  source 1..21: mol_type = other RNA
  modified_base 1: mod_base = OTHER; note = 2'-O-methyladenosine-3'-phosphorothioate
  modified_base 2: mod_base = OTHER; note = 2'-O-methylcytidine-3'-phosphorothioate
  modified_base 3: mod_base = OTHER; note = 2'-O-methyluridine-3'-phosphate
  modified_base 4: mod_base = OTHER; note = 2'-O-methylguanosine-3'-phosphate
  modified_base 5: mod_base = OTHER; note = 2'-O-methyluridine-3'-phosphate
  modified_base 6: mod_base = OTHER; note = 2'-O-methyladenosine-3'-phosphate
  modified_base 7: mod_base = OTHER; note = 2'-fluorouridine-3'-phosphate
  modified_base 8: mod_base = OTHER; note = 2'-O-methylguanosine-3'-phosphate
  modified_base 9: mod_base = OTHER; note = 2'-fluoroguanosine-3'-phosphate
  modified_base 10: mod_base = OTHER; note = 2'-fluorouridine-3'-phosphate
  modified_base 11: mod_base = OTHER; note = 2'-fluorocytidine-3'-phosphate
  modified_base 12: mod_base = OTHER; note = 2'-O-methyladenosine-3'-phosphate
  modified_base 13: mod_base = OTHER; note = 2'-O-methylguanosine-3'-phosphate
  modified_base 14: mod_base = OTHER; note = 2'-O-methylcytidine-3'-phosphate
  modified_base 15: mod_base = OTHER; note = 2'-O-methyladenosine-3'-phosphate
  modified_base 16: mod_base = OTHER; note = 2'-O-methylcytidine-3'-phosphate
  modified_base 17: mod_base = OTHER; note = 2'-O-methyladenosine-3'-phosphate
  modified_base 18: mod_base = OTHER; note = 2'-O-methylcytidine-3'-phosphate
  modified_base 19: mod_base = OTHER; note = 2'-O-methyluridine-3'-phosphate
  modified_base 20: mod_base = OTHER; note = 2'-O-methylcytidine-3'-phosphate
  modified_base 21: mod_base = OTHER; note = 2'-O-methylguanosine-3'-phosphate
actgtatggtcagcacactcg

SEQ ID NO: 162 - RNA, 21 nt, synthetic construct
  source 1..21: mol_type = other RNA
  modified_base 1: mod_base = OTHER; note = 2'-O-methylcytidine-3'-phosphorothioate
  modified_base 2: mod_base = OTHER; note = 2'-O-methylcytidine-3'-phosphorothioate
  modified_base 3: mod_base = OTHER; note = 2'-O-methylcytidine-3'-phosphate
  modified_base 4: mod_base = OTHER; note = 2'-O-methyladenosine-3'-phosphate
  modified_base 5: mod_base = OTHER; note = 2'-O-methylguanosine-3'-phosphate
  modified_base 6: mod_base = OTHER; note = 2'-O-methylguanosine-3'-phosphate
  modified_base 7: mod_base = OTHER; note = 2'-fluorouridine-3'-phosphate
  modified_base 8: mod_base = OTHER; note = 2'-O-methylcytidine-3'-phosphate
  modified_base 9: mod_base = OTHER; note = 2'-fluorouridine-3'-phosphate
  modified_base 10: mod_base = OTHER; note = 2'-fluoroguanosine-3'-phosphate
  modified_base 11: mod_base = OTHER; note = 2'-fluoroguanosine-3'-phosphate
  modified_base 12: mod_base = OTHER; note = 2'-O-methyladenosine-3'-phosphate
  modified_base 13: mod_base = OTHER; note = 2'-O-methyladenosine-3'-phosphate
  modified_base 14: mod_base = OTHER; note = 2'-O-methyluridine-3'-phosphate
  modified_base 15: mod_base = OTHER; note = 2'-O-methylguanosine-3'-phosphate
  modified_base 16: mod_base = OTHER; note = 2'-O-methylcytidine-3'-phosphate
  modified_base 17: mod_base = OTHER; note = 2'-O-methyladenosine-3'-phosphate
  modified_base 18: mod_base = OTHER; note = 2'-O-methyladenosine-3'-phosphate
  modified_base 19: mod_base = OTHER; note = 2'-O-methyladenosine-3'-phosphate
  modified_base 20: mod_base = OTHER; note = 2'-O-methylguanosine-3'-phosphate
  modified_base 21: mod_base = OTHER; note = 2'-O-methyluridine-3'-phosphate
cccaggtctggaatgcaaagt

SEQ ID NO: 163 - RNA, 21 nt, synthetic construct
  source 1..21: mol_type = other RNA
  modified_base 1: mod_base = OTHER; note = 2'-O-methyluridine-3'-phosphorothioate
  modified_base 2: mod_base = OTHER; note = 2'-O-methylcytidine-3'-phosphorothioate
  modified_base 3: mod_base = OTHER; note = 2'-O-methyluridine-3'-phosphate
  modified_base 4: mod_base = OTHER; note = 2'-O-methylguanosine-3'-phosphate
  modified_base 5: mod_base = OTHER; note = 2'-O-methylguanosine-3'-phosphate
  modified_base 6: mod_base = OTHER; note = 2'-O-methyladenosine-3'-phosphate
  modified_base 7: mod_base = OTHER; note = 2'-fluoroadenosine-3'-phosphate
  modified_base 8: mod_base = OTHER; note = 2'-O-methyluridine-3'-phosphate
  modified_base 9: mod_base = OTHER; note = 2'-fluoroguanosine-3'-phosphate
  modified_base 10: mod_base = OTHER; note = 2'-fluorocytidine-3'-phosphate
  modified_base 11: mod_base = OTHER; note = 2'-fluoroadenosine-3'-phosphate
  modified_base 12: mod_base = OTHER; note = 2'-O-methyladenosine-3'-phosphate
  modified_base 13: mod_base = OTHER; note = 2'-O-methyladenosine-3'-phosphate
  modified_base 14: mod_base = OTHER; note = 2'-O-methylguanosine-3'-phosphate
  modified_base 15: mod_base = OTHER; note = 2'-O-methyluridine-3'-phosphate
  modified_base 16: mod_base = OTHER; note = 2'-O-methylcytidine-3'-phosphate
  modified_base 17: mod_base = OTHER; note = 2'-O-methyladenosine-3'-phosphate
  modified_base 18: mod_base = OTHER; note = 2'-O-methyladenosine-3'-phosphate
  modified_base 19: mod_base = OTHER; note = 2'-O-methylguanosine-3'-phosphate
  modified_base 20: mod_base = OTHER; note = 2'-O-methylguanosine-3'-phosphate
  modified_base 21: mod_base = OTHER; note = 2'-O-methyladenosine-3'-phosphate
tctggaatgcaaagtcaagga

SEQ ID NO: 164 - RNA, 21 nt, synthetic construct
  source 1..21: mol_type = other RNA
  modified_base 1: mod_base = OTHER; note = 2'-O-methyluridine-3'-phosphorothioate
  modified_base 2: mod_base = OTHER; note = 2'-O-methyladenosine-3'-phosphorothioate
  modified_base 3: mod_base = OTHER; note = 2'-O-methylguanosine-3'-phosphate
  modified_base 4: mod_base = OTHER; note = 2'-O-methyladenosine-3'-phosphate
  modified_base 5: mod_base = OTHER; note = 2'-O-methylcytidine-3'-phosphate
  modified_base 6: mod_base = OTHER; note = 2'-O-methyladenosine-3'-phosphate
  modified_base 7: mod_base = OTHER; note = 2'-fluoroadenosine-3'-phosphate
  modified_base 8: mod_base = OTHER; note = 2'-O-methylcytidine-3'-phosphate
  modified_base 9: mod_base = OTHER; note = 2'-fluoroadenosine-3'-phosphate
  modified_base 10: mod_base = OTHER; note = 2'-fluorocytidine-3'-phosphate
  modified_base 11: mod_base = OTHER; note = 2'-fluoroguanosine-3'-phosphate
  modified_base 12: mod_base = OTHER; note = 2'-O-methyluridine-3'-phosphate
  modified_base 13: mod_base = OTHER; note = 2'-O-methylguanosine-3'-phosphate
  modified_base 14: mod_base = OTHER; note = 2'-O-methyluridine-3'-phosphate
  modified_base 15: mod_base = OTHER; note = 2'-O-methylguanosine-3'-phosphate
  modified_base 16: mod_base = OTHER; note = 2'-O-methyluridine-3'-phosphate
  modified_base 17: mod_base = OTHER; note = 2'-O-methyladenosine-3'-phosphate
  modified_base 18: mod_base = OTHER; note = 2'-O-methylguanosine-3'-phosphate
  modified_base 19: mod_base = OTHER; note = 2'-O-methyluridine-3'-phosphate
  modified_base 20: mod_base = OTHER; note = 2'-O-methylcytidine-3'-phosphate
  modified_base 21: mod_base = OTHER; note = 2'-O-methyladenosine-3'-phosphate
tagacaacacgtgtgtagtca

SEQ ID NO: 165 - RNA, 21 nt, synthetic construct
  source 1..21: mol_type = other RNA
  modified_base 1: mod_base = OTHER; note = 2'-O-methylcytidine-3'-phosphorothioate
  modified_base 2: mod_base = OTHER; note = 2'-O-methyluridine-3'-phosphorothioate
  modified_base 3: mod_base = OTHER; note = 2'-O-methylguanosine-3'-phosphate
  modified_base 4: mod_base = OTHER; note = 2'-O-methylguanosine-3'-phosphate
  modified_base 5: mod_base = OTHER; note = 2'-O-methylguanosine-3'-phosphate
  modified_base 6: mod_base = OTHER; note = 2'-O-methylguanosine-3'-phosphate
  modified_base 7: mod_base = OTHER; note = 2'-fluorocytidine-3'-phosphate
  modified_base 8: mod_base = OTHER; note = 2'-O-methyluridine-3'-phosphate
  modified_base 9: mod_base = OTHER; note = 2'-fluoroguanosine-3'-phosphate
  modified_base 10: mod_base = OTHER; note = 2'-fluoroadenosine-3'-phosphate
  modified_base 11: mod_base = OTHER; note = 2'-fluoroguanosine-3'-phosphate
  modified_base 12: mod_base = OTHER; note = 2'-O-methylcytidine-3'-phosphate
  modified_base 13: mod_base = OTHER; note = 2'-O-methyluridine-3'-phosphate
  modified_base 14: mod_base = OTHER; note = 2'-O-methyluridine-3'-phosphate
  modified_base 15: mod_base = OTHER; note = 2'-O-methyluridine-3'-phosphate
  modified_base 16: mod_base = OTHER; note = 2'-O-methyladenosine-3'-phosphate
  modified_base 17: mod_base = OTHER; note = 2'-O-methyladenosine-3'-phosphate
  modified_base 18: mod_base = OTHER; note = 2'-O-methyladenosine-3'-phosphate
  modified_base 19: mod_base = OTHER; note = 2'-O-methyladenosine-3'-phosphate
  modified_base 20: mod_base = OTHER; note = 2'-O-methyluridine-3'-phosphate
  modified_base 21: mod_base = OTHER; note = 2'-O-methylguanosine-3'-phosphate
ctggggctgagctttaaaatg

SEQ ID NO: 166 - RNA, 21 nt, synthetic construct
  source 1..21: mol_type = other RNA
  modified_base 1: mod_base = OTHER; note = 2'-O-methyluridine-3'-phosphorothioate
  modified_base 2: mod_base = OTHER; note = 2'-O-methylguanosine-3'-phosphorothioate
  modified_base 3: mod_base = OTHER; note = 2'-O-methylguanosine-3'-phosphate
  modified_base 4: mod_base = OTHER; note = 2'-O-methylguanosine-3'-phosphate
  modified_base 5: mod_base = OTHER; note = 2'-O-methylguanosine-3'-phosphate
  modified_base 6: mod_base = OTHER; note = 2'-O-methylcytidine-3'-phosphate
  modified_base 7: mod_base = OTHER; note = 2'-fluorouridine-3'-phosphate
  modified_base 8: mod_base = OTHER; note = 2'-O-methylguanosine-3'-phosphate
  modified_base 9: mod_base = OTHER; note = 2'-fluoroadenosine-3'-phosphate
  modified_base 10: mod_base = OTHER; note = 2'-fluoroguanosine-3'-phosphate
  modified_base 11: mod_base = OTHER; note = 2'-fluorocytidine-3'-phosphate
  modified_base 12: mod_base = OTHER; note = 2'-O-methyluridine-3'-phosphate
  modified_base 13: mod_base = OTHER; note = 2'-O-methyluridine-3'-phosphate
  modified_base 14: mod_base = OTHER; note = 2'-O-methyluridine-3'-phosphate
  modified_base 15: mod_base = OTHER; note = 2'-O-methyladenosine-3'-phosphate
  modified_base 16: mod_base = OTHER; note = 2'-O-methyladenosine-3'-phosphate
  modified_base 17: mod_base = OTHER; note = 2'-O-methyladenosine-3'-phosphate
  modified_base 18: mod_base = OTHER; note = 2'-O-methyladenosine-3'-phosphate
  modified_base 19: mod_base = OTHER; note = 2'-O-methyluridine-3'-phosphate
  modified_base 20: mod_base = OTHER; note = 2'-O-methylguanosine-3'-phosphate
  modified_base 21: mod_base = OTHER; note = 2'-O-methylguanosine-3'-phosphate
tggggctgagctttaaaatgg

SEQ ID NO: 167 - RNA, 21 nt, synthetic construct
  source 1..21: mol_type = other RNA
  modified_base 1: mod_base = OTHER; note = 2'-O-methylguanosine-3'-phosphorothioate
  modified_base 2: mod_base = OTHER; note = 2'-O-methylguanosine-3'-phosphorothioate
  modified_base 3: mod_base = OTHER; note = 2'-O-methylguanosine-3'-phosphate
  modified_base 4: mod_base = OTHER; note = 2'-O-methylguanosine-3'-phosphate
  modified_base 5: mod_base = OTHER; note = 2'-O-methylcytidine-3'-phosphate
  modified_base 6: mod_base = OTHER; note = 2'-O-methyluridine-3'-phosphate
  modified_base 7: mod_base = OTHER; note = 2'-fluoroguanosine-3'-phosphate
  modified_base 8: mod_base = OTHER; note = 2'-O-methyladenosine-3'-phosphate
  modified_base 9: mod_base = OTHER; note = 2'-fluoroguanosine-3'-phosphate
  modified_base 10: mod_base = OTHER; note = 2'-fluorocytidine-3'-phosphate
  modified_base 11: mod_base = OTHER; note = 2'-fluorouridine-3'-phosphate
  modified_base 12: mod_base = OTHER; note = 2'-O-methyluridine-3'-phosphate
  modified_base 13: mod_base = OTHER; note = 2'-O-methyluridine-3'-phosphate
  modified_base 14: mod_base = OTHER; note = 2'-O-methyladenosine-3'-phosphate
  modified_base 15: mod_base = OTHER; note = 2'-O-methyladenosine-3'-phosphate
  modified_base 16: mod_base = OTHER; note = 2'-O-methyladenosine-3'-phosphate
  modified_base 17: mod_base = OTHER; note = 2'-O-methyladenosine-3'-phosphate
  modified_base 18: mod_base = OTHER; note = 2'-O-methyluridine-3'-phosphate
  modified_base 19: mod_base = OTHER; note = 2'-O-methylguanosine-3'-phosphate
  modified_base 20: mod_base = OTHER; note = 2'-O-methylguanosine-3'-phosphate
  modified_base 21: mod_base = OTHER; note = 2'-O-methyluridine-3'-phosphate
ggggctgagctttaaaatggt

SEQ ID NO: 168 - RNA, 21 nt, synthetic construct
  source 1..21: mol_type = other RNA
  modified_base 1: mod_base = OTHER; note = 2'-O-methylguanosine-3'-phosphorothioate
  modified_base 2: mod_base = OTHER; note = 2'-O-methylguanosine-3'-phosphorothioate
  modified_base 3: mod_base = OTHER; note = 2'-O-methylguanosine-3'-phosphate
  modified_base 4: mod_base = OTHER; note = 2'-O-methylcytidine-3'-phosphate
  modified_base 5: mod_base = OTHER; note = 2'-O-methyluridine-3'-phosphate
  modified_base 6: mod_base = OTHER; note = 2'-O-methylguanosine-3'-phosphate
  modified_base 7: mod_base = OTHER; note = 2'-fluoroadenosine-3'-phosphate
  modified_base 8: mod_base = OTHER; note = 2'-O-methylguanosine-3'-phosphate
  modified_base 9: mod_base = OTHER; note = 2'-fluorocytidine-3'-phosphate
  modified_base 10: mod_base = OTHER; note = 2'-fluorouridine-3'-phosphate
  modified_base 11: mod_base = OTHER; note = 2'-fluorouridine-3'-phosphate
  modified_base 12: mod_base = OTHER; note = 2'-O-methyluridine-3'-phosphate
  modified_base 13: mod_base = OTHER; note = 2'-O-methyladenosine-3'-phosphate
  modified_base 14: mod_base = OTHER; note = 2'-O-methyladenosine-3'-phosphate
  modified_base 15: mod_base = OTHER; note = 2'-O-methyladenosine-3'-phosphate
  modified_base 16: mod_base = OTHER; note = 2'-O-methyladenosine-3'-phosphate
  modified_base 17: mod_base = OTHER; note = 2'-O-methyluridine-3'-phosphate
  modified_base 18: mod_base = OTHER; note = 2'-O-methylguanosine-3'-phosphate
  modified_base 19: mod_base = OTHER; note = 2'-O-methylguanosine-3'-phosphate
  modified_base 20: mod_base = OTHER; note = 2'-O-methyluridine-3'-phosphate
  modified_base 21: mod_base = OTHER; note = 2'-O-methyluridine-3'-phosphate
gggctgagctttaaaatggtt

SEQ ID NO: 169 - RNA, 21 nt, synthetic construct
  source 1..21: mol_type = other RNA
  modified_base 1: mod_base = OTHER; note = 2'-O-methylguanosine-3'-phosphorothioate
  modified_base 2: mod_base = OTHER; note = 2'-O-methylguanosine-3'-phosphorothioate
  modified_base 3: mod_base = OTHER; note = 2'-O-methylcytidine-3'-phosphate
  modified_base 4: mod_base = OTHER; note = 2'-O-methyluridine-3'-phosphate
  modified_base 5: mod_base = OTHER; note = 2'-O-methylguanosine-3'-phosphate
  modified_base 6: mod_base = OTHER; note = 2'-O-methyladenosine-3'-phosphate
  modified_base 7: mod_base = OTHER; note = 2'-fluoroguanosine-3'-phosphate
  modified_base 8: mod_base = OTHER; note = 2'-O-methylcytidine-3'-phosphate
  modified_base 9: mod_base = OTHER; note = 2'-fluorouridine-3'-phosphate
  modified_base 10: mod_base = OTHER; note = 2'-fluorouridine-3'-phosphate
  modified_base 11: mod_base = OTHER; note = 2'-fluorouridine-3'-phosphate
  modified_base 12: mod_base = OTHER; note = 2'-O-methyladenosine-3'-phosphate
  modified_base 13: mod_base = OTHER; note = 2'-O-methyladenosine-3'-phosphate
  modified_base 14: mod_base = OTHER; note = 2'-O-methyladenosine-3'-phosphate
  modified_base 15: mod_base = OTHER; note = 2'-O-methyladenosine-3'-phosphate
  modified_base 16: mod_base = OTHER; note = 2'-O-methyluridine-3'-phosphate
  modified_base 17: mod_base = OTHER; note = 2'-O-methylguanosine-3'-phosphate
  modified_base 18: mod_base = OTHER; note = 2'-O-methylguanosine-3'-phosphate
  modified_base 19: mod_base = OTHER; note = 2'-O-methyluridine-3'-phosphate
  modified_base 20: mod_base = OTHER; note = 2'-O-methyluridine-3'-phosphate
  modified_base 21: mod_base = OTHER; note = 2'-O-methylcytidine-3'-phosphate
ggctgagctttaaaatggttc

SEQ ID NO: 170 - RNA, 21 nt, synthetic construct
  source 1..21: mol_type = other RNA
  modified_base 1: mod_base = OTHER; note = 2'-O-methyladenosine-3'-phosphorothioate
  modified_base 2: mod_base = OTHER; note = 2'-O-methylguanosine-3'-phosphorothioate
  modified_base 3: mod_base = OTHER; note = 2'-O-methylcytidine-3'-phosphate
  modified_base 4: mod_base = OTHER; note = 2'-O-methyluridine-3'-phosphate
  modified_base 5: mod_base = OTHER; note = 2'-O-methyluridine-3'-phosphate
  modified_base 6: mod_base = OTHER; note = 2'-O-methyluridine-3'-phosphate
  modified_base 7: mod_base = OTHER; note = 2'-fluoroadenosine-3'-phosphate
  modified_base 8: mod_base = OTHER; note = 2'-O-methyladenosine-3'-phosphate
  modified_base 9: mod_base = OTHER; note = 2'-fluoroadenosine-3'-phosphate
  modified_base 10: mod_base = OTHER; note = 2'-fluoroadenosine-3'-phosphate
  modified_base 11: mod_base = OTHER; note = 2'-fluorouridine-3'-phosphate
  modified_base 12: mod_base = OTHER; note = 2'-O-methylguanosine-3'-phosphate
  modified_base 13: mod_base = OTHER; note = 2'-O-methylguanosine-3'-phosphate
  modified_base 14: mod_base = OTHER; note = 2'-O-methyluridine-3'-phosphate
  modified_base 15: mod_base = OTHER; note = 2'-O-methyluridine-3'-phosphate
  modified_base 16: mod_base = OTHER; note = 2'-O-methylcytidine-3'-phosphate
  modified_base 17: mod_base = OTHER; note = 2'-O-methylcytidine-3'-phosphate
  modified_base 18: mod_base = OTHER; note = 2'-O-methylguanosine-3'-phosphate
  modified_base 19: mod_base = OTHER; note = 2'-O-methyladenosine-3'-phosphate
  modified_base 20: mod_base = OTHER; note = 2'-O-methylcytidine-3'-phosphate
  modified_base 21: mod_base = OTHER; note = 2'-O-methyluridine-3'-phosphate
agctttaaaatggttccgact

SEQ ID NO: 171 - RNA, 21 nt, synthetic construct
  source 1..21: mol_type = other RNA
  modified_base 1: mod_base = OTHER; note = 2'-O-methylguanosine-3'-phosphorothioate
  modified_base 2: mod_base = OTHER; note = 2'-O-methylcytidine-3'-phosphorothioate
  modified_base 3: mod_base = OTHER; note = 2'-O-methyluridine-3'-phosphate
  modified_base 4: mod_base = OTHER; note = 2'-O-methyluridine-3'-phosphate
  modified_base 5: mod_base = OTHER; note = 2'-O-methyluridine-3'-phosphate
  modified_base 6: mod_base = OTHER; note = 2'-O-methyladenosine-3'-phosphate
  modified_base 7: mod_base = OTHER; note = 2'-fluoroadenosine-3'-phosphate
  modified_base 8: mod_base = OTHER; note = 2'-O-methyladenosine-3'-phosphate
  modified_base 9: mod_base = OTHER; note = 2'-fluoroadenosine-3'-phosphate
  modified_base 10: mod_base = OTHER; note = 2'-fluorouridine-3'-phosphate
  modified_base 11: mod_base = OTHER; note = 2'-fluoroguanosine-3'-phosphate
  modified_base 12: mod_base = OTHER; note = 2'-O-methylguanosine-3'-phosphate
  modified_base 13: mod_base = OTHER; note = 2'-O-methyluridine-3'-phosphate
  modified_base 14: mod_base = OTHER; note = 2'-O-methyluridine-3'-phosphate
  modified_base 15: mod_base = OTHER; note = 2'-O-methylcytidine-3'-phosphate
  modified_base 16: mod_base = OTHER; note = 2'-O-methylcytidine-3'-phosphate
  modified_base 17: mod_base = OTHER; note = 2'-O-methylguanosine-3'-phosphate
  modified_base 18: mod_base = OTHER; note = 2'-O-methyladenosine-3'-phosphate
  modified_base 19: mod_base = OTHER; note = 2'-O-methylcytidine-3'-phosphate
  modified_base 20: mod_base = OTHER; note = 2'-O-methyluridine-3'-phosphate
  modified_base 21: mod_base = OTHER; note = 2'-O-methyluridine-3'-phosphate
gctttaaaatggttccgactt

SEQ ID NO: 172 - RNA, 21 nt, synthetic construct
  source 1..21: mol_type = other RNA
  modified_base 1: mod_base = OTHER; note = 2'-O-methyluridine-3'-phosphorothioate
  modified_base 2: mod_base = OTHER; note = 2'-O-methyluridine-3'-phosphorothioate
  modified_base 3: mod_base = OTHER; note = 2'-O-methyluridine-3'-phosphate
  modified_base 4: mod_base = OTHER; note = 2'-O-methyladenosine-3'-phosphate
  modified_base 5: mod_base = OTHER; note = 2'-O-methyladenosine-3'-phosphate
  modified_base 6: mod_base = OTHER; note = 2'-O-methyladenosine-3'-phosphate
  modified_base 7: mod_base = OTHER; note = 2'-fluoroadenosine-3'-phosphate
  modified_base 8: mod_base = OTHER; note = 2'-O-methyluridine-3'-phosphate
  modified_base 9: mod_base = OTHER; note = 2'-fluoroguanosine-3'-phosphate
  modified_base 10: mod_base = OTHER; note = 2'-fluoroguanosine-3'-phosphate
  modified_base 11: mod_base = OTHER; note = 2'-fluorouridine-3'-phosphate
  modified_base 12: mod_base = OTHER; note = 2'-O-methyluridine-3'-phosphate
  modified_base 13: mod_base = OTHER; note = 2'-O-methylcytidine-3'-phosphate
  modified_base 14: mod_base = OTHER; note = 2'-O-methylcytidine-3'-phosphate
  modified_base 15: mod_base = OTHER; note = 2'-O-methylguanosine-3'-phosphate
  modified_base 16: mod_base = OTHER; note = 2'-O-methyladenosine-3'-phosphate
  modified_base 17: mod_base = OTHER; note = 2'-O-methylcytidine-3'-phosphate
  modified_base 18: mod_base = OTHER; note = 2'-O-methyluridine-3'-phosphate
  modified_base 19: mod_base = OTHER; note = 2'-O-methyluridine-3'-phosphate
  modified_base 20: mod_base = OTHER; note = 2'-O-methylguanosine-3'-phosphate
  modified_base 21: mod_base = OTHER; note = 2'-O-methyluridine-3'-phosphate
tttaaaatggttccgacttgt

SEQ ID NO: 173 - RNA, 21 nt, synthetic construct
  source 1..21: mol_type = other RNA
  modified_base 1: mod_base = OTHER; note = 2'-O-methyluridine-3'-phosphorothioate
  modified_base 2: mod_base = OTHER; note = 2'-O-methylguanosine-3'-phosphorothioate
  modified_base 3: mod_base = OTHER; note = 2'-O-methylcytidine-3'-phosphate
  modified_base 4: mod_base = OTHER; note = 2'-O-methyluridine-3'-phosphate
  modified_base 5: mod_base = OTHER; note = 2'-O-methylguanosine-3'-phosphate
  modified_base 6: mod_base = OTHER; note = 2'-O-methylguanosine-3'-phosphate
  modified_base 7: mod_base = OTHER; note = 2'-fluorocytidine-3'-phosphate
  modified_base 8: mod_base = OTHER; note = 2'-O-methylcytidine-3'-phosphate
  modified_base 9: mod_base = OTHER; note = 2'-fluorouridine-3'-phosphate
  modified_base 10: mod_base = OTHER; note = 2'-fluoroguanosine-3'-phosphate
  modified_base 11: mod_base = OTHER; note = 2'-fluoroguanosine-3'-phosphate
  modified_base 12: mod_base = OTHER; note = 2'-O-methylcytidine-3'-phosphate
  modified_base 13: mod_base = OTHER; note = 2'-O-methylcytidine-3'-phosphate
  modified_base 14: mod_base = OTHER; note = 2'-O-methylcytidine-3'-phosphate
  modified_base 15: mod_base = OTHER; note = 2'-O-methyluridine-3'-phosphate
  modified_base 16: mod_base = OTHER; note = 2'-O-methyluridine-3'-phosphate
  modified_base 17: mod_base = OTHER; note = 2'-O-methylguanosine-3'-phosphate
  modified_base 18: mod_base = OTHER; note = 2'-O-methyladenosine-3'-phosphate
  modified_base 19: mod_base = OTHER; note = 2'-O-methylguanosine-3'-phosphate
  modified_base 20: mod_base = OTHER; note = 2'-O-methyluridine-3'-phosphate
  modified_base 21: mod_base = OTHER; note = 2'-O-methylguanosine-3'-phosphate
tgctggcctggcccttgagtg

SEQ ID NO: 174 - RNA, 21 nt, synthetic construct
  source 1..21: mol_type = other RNA
  modified_base 1: mod_base = OTHER; note = 2'-O-methylguanosine-3'-phosphorothioate
  modified_base 2: mod_base = OTHER; note = 2'-O-methylcytidine-3'-phosphorothioate
  modified_base 3: mod_base = OTHER; note = 2'-O-methyluridine-3'-phosphate
  modified_base 4: mod_base = OTHER; note = 2'-O-methylguanosine-3'-phosphate
  modified_base 5: mod_base = OTHER; note = 2'-O-methylguanosine-3'-phosphate
  modified_base 6: mod_base = OTHER; note = 2'-O-methylcytidine-3'-phosphate
  modified_base 7: mod_base = OTHER; note = 2'-fluorocytidine-3'-phosphate
  modified_base 8: mod_base = OTHER; note = 2'-O-methyluridine-3'-phosphate
  modified_base 9: mod_base = OTHER; note = 2'-fluoroguanosine-3'-phosphate
  modified_base 10: mod_base = OTHER; note = 2'-fluoroguanosine-3'-phosphate
  modified_base 11: mod_base = OTHER; note = 2'-fluorocytidine-3'-phosphate
  modified_base 12: mod_base = OTHER; note = 2'-O-methylcytidine-3'-phosphate
  modified_base 13: mod_base = OTHER; note = 2'-O-methylcytidine-3'-phosphate
  modified_base 14: mod_base = OTHER; note = 2'-O-methyluridine-3'-phosphate
  modified_base 15: mod_base = OTHER; note = 2'-O-methyluridine-3'-phosphate
  modified_base 16: mod_base = OTHER; note = 2'-O-methylguanosine-3'-phosphate
  modified_base 17: mod_base = OTHER; note = 2'-O-methyladenosine-3'-phosphate
  modified_base 18: mod_base = OTHER; note = 2'-O-methylguanosine-3'-phosphate
  modified_base 19: mod_base = OTHER; note = 2'-O-methyluridine-3'-phosphate
  modified_base 20: mod_base = OTHER; note = 2'-O-methylguanosine-3'-phosphate
  modified_base 21: mod_base = OTHER; note = 2'-O-methylguanosine-3'-phosphate
gctggcctggcccttgagtgg

SEQ ID NO: 175 - RNA, 21 nt, synthetic construct
  source 1..21: mol_type = other RNA
  modified_base 1: mod_base = OTHER; note = 2'-O-methylcytidine-3'-phosphorothioate
  modified_base 2: mod_base = OTHER; note = 2'-O-methylcytidine-3'-phosphorothioate
  modified_base 3: mod_base = OTHER; note = 2'-O-methylcytidine-3'-phosphate
  modified_base 4: mod_base = OTHER; note = 2'-O-methyluridine-3'-phosphate
  modified_base 5: mod_base = OTHER; note = 2'-O-methylcytidine-3'-phosphate
  modified_base 6: mod_base = OTHER; note = 2'-O-methyladenosine-3'-phosphate
  modified_base 7: mod_base = OTHER; note = 2'-fluorocytidine-3'-phosphate
  modified_base 8: mod_base = OTHER; note = 2'-O-methyluridine-3'-phosphate
  modified_base 9: mod_base = OTHER; note = 2'-fluoroguanosine-3'-phosphate
  modified_base 10: mod_base = OTHER; note = 2'-fluorouridine-3'-phosphate
  modified_base 11: mod_base = OTHER; note = 2'-fluoroguanosine-3'-phosphate
  modified_base 12: mod_base = OTHER; note = 2'-O-methylguanosine-3'-phosphate
  modified_base 13: mod_base = OTHER; note = 2'-O-methylguanosine-3'-phosphate
  modified_base 14: mod_base = OTHER; note = 2'-O-methylguanosine-3'-phosphate
  modified_base 15: mod_base = OTHER; note = 2'-O-methylcytidine-3'-phosphate
  modified_base 16: mod_base = OTHER; note = 2'-O-methyladenosine-3'-phosphate
  modified_base 17: mod_base = OTHER; note = 2'-O-methyluridine-3'-phosphate
  modified_base 18: mod_base = OTHER; note = 2'-O-methyluridine-3'-phosphate
  modified_base 19: mod_base = OTHER; note = 2'-O-methyluridine-3'-phosphate
  modified_base 20: mod_base = OTHER; note = 2'-O-methylcytidine-3'-phosphate
  modified_base 21: mod_base = OTHER; note = 2'-O-methyladenosine-3'-phosphate
ccctcactgtggggcatttca

SEQ ID NO: 176 - RNA, 21 nt, synthetic construct
  source 1..21: mol_type = other RNA
  modified_base 1: mod_base = OTHER; note = 2'-O-methylcytidine-3'-phosphorothioate
  modified_base 2: mod_base = OTHER; note = 2'-O-methyladenosine-3'-phosphorothioate
  modified_base 3: mod_base = OTHER; note = 2'-O-methylcytidine-3'-phosphate
  modified_base 4: mod_base = OTHER; note = 2'-O-methyluridine-3'-phosphate
  modified_base 5: mod_base = OTHER; note = 2'-O-methylguanosine-3'-phosphate
  modified_base 6: mod_base = OTHER; note = 2'-O-methyluridine-3'-phosphate
  modified_base 7: mod_base = OTHER; note = 2'-fluoroguanosine-3'-phosphate
  modified_base 8: mod_base = OTHER; note = 2'-O-methylguanosine-3'-phosphate
  modified_base 9: mod_base = OTHER; note = 2'-fluoroguanosine-3'-phosphate
  modified_base 10: mod_base = OTHER; note = 2'-fluoroguanosine-3'-phosphate
  modified_base 11: mod_base = OTHER; note = 2'-fluorocytidine-3'-phosphate
  modified_base 12: mod_base = OTHER; note = 2'-O-methyladenosine-3'-phosphate
  modified_base 13: mod_base = OTHER; note = 2'-O-methyluridine-3'-phosphate
  modified_base 14: mod_base = OTHER; note = 2'-O-methyluridine-3'-phosphate
  modified_base 15: mod_base = OTHER; note = 2'-O-methyluridine-3'-phosphate
  modified_base 16: mod_base = OTHER; note = 2'-O-methylcytidine-3'-phosphate
  modified_base 17: mod_base = OTHER; note = 2'-O-methyladenosine-3'-phosphate
  modified_base 18: mod_base = OTHER; note = 2'-O-methylcytidine-3'-phosphate
  modified_base 19: mod_base = OTHER; note = 2'-O-methylcytidine-3'-phosphate
  modified_base 20: mod_base = OTHER; note = 2'-O-methyladenosine-3'-phosphate
  modified_base 21: mod_base = OTHER; note = 2'-O-methyluridine-3'-phosphate
cactgtggggcatttcaccat

SEQ ID NO: 177 - RNA, 21 nt, synthetic construct
  source 1..21: mol_type = other RNA
  modified_base 1: mod_base = OTHER; note = 2'-O-methylcytidine-3'-phosphorothioate
  modified_base 2: mod_base = OTHER; note = 2'-O-methyluridine-3'-phosphorothioate
  modified_base 3: mod_base = OTHER; note = 2'-O-methylguanosine-3'-phosphate
  modified_base 4: mod_base = OTHER; note = 2'-O-methyluridine-3'-phosphate
  modified_base 5: mod_base = OTHER; note = 2'-O-methylguanosine-3'-phosphate
  modified_base 6: mod_base = OTHER; note = 2'-O-methylguanosine-3'-phosphate
  modified_base 7: mod_base = OTHER; note = 2'-fluoroguanosine-3'-phosphate
  modified_base 8: mod_base = OTHER; note = 2'-O-methylguanosine-3'-phosphate
  modified_base 9: mod_base = OTHER; note = 2'-fluorocytidine-3'-phosphate
  modified_base 10: mod_base = OTHER; note = 2'-fluoroadenosine-3'-phosphate
  modified_base 11: mod_base = OTHER; note = 2'-fluorouridine-3'-phosphate
  modified_base 12: mod_base = OTHER; note = 2'-O-methyluridine-3'-phosphate
  modified_base 13: mod_base = OTHER; note = 2'-O-methyluridine-3'-phosphate
  modified_base 14: mod_base = OTHER; note = 2'-O-methylcytidine-3'-phosphate
  modified_base 15: mod_base = OTHER; note = 2'-O-methyladenosine-3'-phosphate
  modified_base 16: mod_base = OTHER; note = 2'-O-methylcytidine-3'-phosphate
  modified_base 17: mod_base = OTHER; note = 2'-O-methylcytidine-3'-phosphate
  modified_base 18: mod_base = OTHER; note = 2'-O-methyladenosine-3'-phosphate
  modified_base 19: mod_base = OTHER; note = 2'-O-methyluridine-3'-phosphate
  modified_base 20: mod_base = OTHER; note = 2'-O-methyluridine-3'-phosphate
  modified_base 21: mod_base = OTHER; note = 2'-O-methylcytidine-3'-phosphate
ctgtggggcatttcaccattc

SEQ ID NO: 178 - RNA, 21 nt, synthetic construct
  source 1..21: mol_type = other RNA
  modified_base 1: mod_base = OTHER; note = 2'-O-methyluridine-3'-phosphorothioate
  modified_base 2: mod_base = OTHER; note = 2'-O-methylguanosine-3'-phosphorothioate
  modified_base 3: mod_base = OTHER; note = 2'-O-methylguanosine-3'-phosphate
  modified_base 4: mod_base = OTHER; note = 2'-O-methylguanosine-3'-phosphate
  modified_base 5: mod_base = OTHER; note = 2'-O-methylguanosine-3'-phosphate
  modified_base 6: mod_base = OTHER; note = 2'-O-methylcytidine-3'-phosphate
  modified_base 7: mod_base = OTHER; note = 2'-fluoroadenosine-3'-phosphate
  modified_base 8: mod_base = OTHER; note = 2'-O-methyluridine-3'-phosphate
  modified_base 9: mod_base = OTHER; note = 2'-fluorouridine-3'-phosphate
  modified_base 10: mod_base = OTHER; note = 2'-fluorouridine-3'-phosphate
  modified_base 11: mod_base = OTHER; note = 2'-fluorocytidine-3'-phosphate
  modified_base 12: mod_base = OTHER; note = 2'-O-methyladenosine-3'-phosphate
  modified_base 13: mod_base = OTHER; note = 2'-O-methylcytidine-3'-phosphate
  modified_base 14: mod_base = OTHER; note = 2'-O-methylcytidine-3'-phosphate
  modified_base 15: mod_base = OTHER; note = 2'-O-methyladenosine-3'-phosphate
  modified_base 16: mod_base = OTHER; note = 2'-O-methyluridine-3'-phosphate
  modified_base 17: mod_base = OTHER; note = 2'-O-methyluridine-3'-phosphate
  modified_base 18: mod_base = OTHER; note = 2'-O-methylcytidine-3'-phosphate
  modified_base 19: mod_base = OTHER; note = 2'-O-methyladenosine-3'-phosphate
  modified_base 20: mod_base = OTHER; note = 2'-O-methyladenosine-3'-phosphate
  modified_base 21: mod_base = OTHER; note = 2'-O-methyladenosine-3'-phosphate
tggggcatttcaccattcaaa

SEQ ID NO: 179 - RNA, 21 nt, synthetic construct
  source 1..21: mol_type = other RNA
  modified_base 1: mod_base = OTHER; note = 2'-O-methylguanosine-3'-phosphorothioate
  modified_base 2: mod_base = OTHER; note = 2'-O-methylcytidine-3'-phosphorothioate
  modified_base 3: mod_base = OTHER; note = 2'-O-methyladenosine-3'-phosphate
  modified_base 4: mod_base = OTHER; note = 2'-O-methyluridine-3'-phosphate
  modified_base 5: mod_base = OTHER; note = 2'-O-methyluridine-3'-phosphate
  modified_base 6: mod_base = OTHER; note = 2'-O-methyluridine-3'-phosphate
  modified_base 7: mod_base = OTHER; note = 2'-fluorocytidine-3'-phosphate
  modified_base 8: mod_base = OTHER; note = 2'-O-methyladenosine-3'-phosphate
  modified_base 9: mod_base = OTHER; note = 2'-fluorocytidine-3'-phosphate
  modified_base 10: mod_base = OTHER; note = 2'-fluorocytidine-3'-phosphate
  modified_base 11: mod_base = OTHER; note = 2'-fluoroadenosine-3'-phosphate
  modified_base 12: mod_base = OTHER; note = 2'-O-methyluridine-3'-phosphate
  modified_base 13: mod_base = OTHER; note = 2'-O-methyluridine-3'-phosphate
  modified_base 14: mod_base = OTHER; note = 2'-O-methylcytidine-3'-phosphate
  modified_base 15: mod_base = OTHER; note = 2'-O-methyladenosine-3'-phosphate
  modified_base 16: mod_base = OTHER; note = 2'-O-methyladenosine-3'-phosphate
  modified_base 17: mod_base = OTHER; note = 2'-O-methyladenosine-3'-phosphate
  modified_base 18: mod_base = OTHER; note = 2'-O-methylcytidine-3'-phosphate
  modified_base 19: mod_base = OTHER; note = 2'-O-methyladenosine-3'-phosphate
  modified_base 20: mod_base = OTHER; note = 2'-O-methylguanosine-3'-phosphate
  modified_base 21: mod_base = OTHER; note = 2'-O-methylguanosine-3'-phosphate
gcatttcaccattcaaacagg

SEQ ID NO: 180 - RNA, 21 nt, synthetic construct
  source 1..21: mol_type = other RNA
  modified_base 1: mod_base = OTHER; note = 2'-O-methyluridine-3'-phosphorothioate
  modified_base 2: mod_base = OTHER; note = 2'-O-methyluridine-3'-phosphorothioate
  modified_base 3: mod_base = OTHER; note = 2'-O-methyluridine-3'-phosphate
  modified_base 4: mod_base = OTHER; note = 2'-O-methyladenosine-3'-phosphate
  modified_base 5: mod_base = OTHER; note = 2'-O-methyluridine-3'-phosphate
  modified_base 6: mod_base = OTHER; note = 2'-O-methyluridine-3'-phosphate
  modified_base 7: mod_base = OTHER; note = 2'-fluoroguanosine-3'-phosphate
  modified_base 8: mod_base = OTHER; note = 2'-O-methyladenosine-3'-phosphate
  modified_base 9: mod_base = OTHER; note = 2'-fluoroguanosine-3'-phosphate
  modified_base 10: mod_base = OTHER; note = 2'-fluorocytidine-3'-phosphate
  modified_base 11: mod_base = OTHER; note = 2'-fluorouridine-3'-phosphate
  modified_base 12: mod_base = OTHER; note = 2'-O-methylcytidine-3'-phosphate
  modified_base 13: mod_base = OTHER; note = 2'-O-methyluridine-3'-phosphate
  modified_base 14: mod_base = OTHER; note = 2'-O-methyluridine-3'-phosphate
  modified_base 15: mod_base = OTHER; note = 2'-O-methylguanosine-3'-phosphate
  modified_base 16: mod_base = OTHER; note = 2'-O-methyluridine-3'-phosphate
  modified_base 17: mod_base = OTHER; note = 2'-O-methyluridine-3'-phosphate
  modified_base 18: mod_base = OTHER; note = 2'-O-methylcytidine-3'-phosphate
  modified_base 19: mod_base = OTHER; note = 2'-O-methylcytidine-3'-phosphate
  modified_base 20: mod_base = OTHER; note = 2'-O-methylguanosine-3'-phosphate
  modified_base 21: mod_base = OTHER; note = 2'-O-methyluridine-3'-phosphate
tttattgagctcttgttccgt

SEQ ID NO: 181 - RNA, 21 nt, synthetic construct
  source 1..21: mol_type = other RNA
  modified_base 1: mod_base = OTHER; note = 2'-O-methylcytidine-3'-phosphorothioate
  modified_base 2: mod_base = OTHER; note = 2'-O-methylcytidine-3'-phosphorothioate
  modified_base 3: mod_base = OTHER; note = 2'-O-methylcytidine-3'-phosphate
  modified_base 4: mod_base = OTHER; note = 2'-O-methyluridine-3'-phosphate
  modified_base 5: mod_base = OTHER; note = 2'-O-methylcytidine-3'-phosphate
  modified_base 6: mod_base = OTHER; note = 2'-O-methyladenosine-3'-phosphate
  modified_base 7: mod_base = OTHER; note = 2'-fluorouridine-3'-phosphate
  modified_base 8: mod_base = OTHER; note = 2'-O-methylcytidine-3'-phosphate
  modified_base 9: mod_base = OTHER; note = 2'-fluorouridine-3'-phosphate
  modified_base 10: mod_base = OTHER; note = 2'-fluorocytidine-3'-phosphate
  modified_base 11: mod_base = OTHER; note = 2'-fluorocytidine-3'-phosphate
  modified_base 12: mod_base = OTHER; note = 2'-O-methyladenosine-3'-phosphate
  modified_base 13: mod_base = OTHER; note = 2'-O-methylguanosine-3'-phosphate
  modified_base 14: mod_base = OTHER; note = 2'-O-methylcytidine-3'-phosphate
  modified_base 15: mod_base = OTHER; note = 2'-O-methyluridine-3'-phosphate
  modified_base 16: mod_base = OTHER; note = 2'-O-methyladenosine-3'-phosphate
  modified_base 17: mod_base = OTHER; note = 2'-O-methyladenosine-3'-phosphate
  modified_base 18: mod_base = OTHER; note = 2'-O-methylcytidine-3'-phosphate
  modified_base 19: mod_base = OTHER; note = 2'-O-methyluridine-3'-phosphate
  modified_base 20: mod_base = OTHER; note = 2'-O-methylguanosine-3'-phosphate
  modified_base 21: mod_base = OTHER; note = 2'-O-methyluridine-3'-phosphate
ccctcatctccagctaactgt

SEQ ID NO: 182 - RNA, 21 nt, synthetic construct
  source 1..21: mol_type = other RNA
  modified_base 1: mod_base = OTHER; note = 2'-O-methyladenosine-3'-phosphorothioate
  modified_base 2: mod_base = OTHER; note = 2'-O-methylcytidine-3'-phosphorothioate
  modified_base 3: mod_base = OTHER; note = 2'-O-methyluridine-3'-phosphate
  modified_base 4: mod_base = OTHER; note = 2'-O-methylguanosine-3'-phosphate
  modified_base 5: mod_base = OTHER; note = 2'-O-methyladenosine-3'-phosphate
  modified_base 6: mod_base = OTHER; note = 2'-O-methylguanosine-3'-phosphate
  modified_base 7: mod_base = OTHER; note = 2'-fluorocytidine-3'-phosphate
  modified_base 8: mod_base = OTHER; note = 2'-O-methylcytidine-3'-phosphate
  modified_base 9: mod_base = OTHER; note = 2'-fluoroadenosine-3'-phosphate
  modified_base 10: mod_base = OTHER; note = 2'-fluoroguanosine-3'-phosphate
  modified_base 11: mod_base = OTHER; note = 2'-fluoroadenosine-3'-phosphate
  modified_base 12: mod_base = OTHER; note = 2'-O-methyladenosine-3'-phosphate
  modified_base 13: mod_base = OTHER; note = 2'-O-methyladenosine-3'-phosphate
  modified_base 14: mod_base = OTHER; note = 2'-O-methylcytidine-3'-phosphate
  modified_base 15: mod_base = OTHER; note = 2'-O-methylguanosine-3'-phosphate
  modified_base 16: mod_base = OTHER; note = 2'-O-methylcytidine-3'-phosphate
  modified_base 17: mod_base = OTHER; note = 2'-O-methyladenosine-3'-phosphate
  modified_base 18: mod_base = OTHER; note = 2'-O-methylguanosine-3'-phosphate
  modified_base 19: mod_base = OTHER; note = 2'-O-methyladenosine-3'-phosphate
  modified_base 20: mod_base = OTHER; note = 2'-O-methyluridine-3'-phosphate
  modified_base 21: mod_base = OTHER; note = 2'-O-methyluridine-3'-phosphate
actgagccagaaacgcagatt

SEQ ID NO: 183 - RNA, 21 nt, synthetic construct
  source 1..21: mol_type = other RNA
  modified_base 1: mod_base = OTHER; note = 2'-O-methyluridine-3'-phosphorothioate
  modified_base 2: mod_base = OTHER; note = 2'-O-methylguanosine-3'-phosphorothioate
  modified_base 3: mod_base = OTHER; note = 2'-O-methyladenosine-3'-phosphate
  modified_base 4: mod_base = OTHER; note = 2'-O-methylguanosine-3'-phosphate
  modified_base 5: mod_base = OTHER; note = 2'-O-methylcytidine-3'-phosphate
  modified_base 6: mod_base = OTHER; note = 2'-O-methylcytidine-3'-phosphate
  modified_base 7: mod_base = OTHER; note = 2'-fluoroadenosine-3'-phosphate
  modified_base 8: mod_base = OTHER; note = 2'-O-methylguanosine-3'-phosphate
  modified_base 9: mod_base = OTHER; note = 2'-fluoroadenosine-3'-phosphate
  modified_base 10: mod_base = OTHER; note = 2'-fluoroadenosine-3'-phosphate
  modified_base 11: mod_base = OTHER; note = 2'-fluoroadenosine-3'-phosphate
  modified_base 12: mod_base = OTHER; note = 2'-O-methylcytidine-3'-phosphate
  modified_base 13: mod_base = OTHER; note = 2'-O-methylguanosine-3'-phosphate
  modified_base 14: mod_base = OTHER; note = 2'-O-methylcytidine-3'-phosphate
  modified_base 15: mod_base = OTHER; note = 2'-O-methyladenosine-3'-phosphate
  modified_base 16: mod_base = OTHER; note = 2'-O-methylguanosine-3'-phosphate
  modified_base 17: mod_base = OTHER; note = 2'-O-methyladenosine-3'-phosphate
  modified_base 18: mod_base = OTHER; note = 2'-O-methyluridine-3'-phosphate
  modified_base 19: mod_base = OTHER; note = 2'-O-methyluridine-3'-phosphate
  modified_base 20: mod_base = OTHER; note = 2'-O-methylguanosine-3'-phosphate
  modified_base 21: mod_base = OTHER; note = 2'-O-methylguanosine-3'-phosphate
tgagccagaaacgcagattgg

SEQ ID NO: 184 - RNA, 21 nt, synthetic construct
  source 1..21: mol_type = other RNA
  modified_base 1: mod_base = OTHER; note = 2'-O-methylguanosine-3'-phosphorothioate
  modified_base 2: mod_base = OTHER; note = 2'-O-methyladenosine-3'-phosphorothioate
  modified_base 3: mod_base = OTHER; note = 2'-O-methyladenosine-3'-phosphate
  modified_base 4: mod_base = OTHER; note = 2'-O-methylguanosine-3'-phosphate
  modified_base 5: mod_base = OTHER; note = 2'-O-methylcytidine-3'-phosphate
  modified_base 6: mod_base = OTHER; note = 2'-O-methylcytidine-3'-phosphate
  modified_base 7: mod_base = OTHER; note = 2'-fluoroadenosine-3'-phosphate
  modified_base 8: mod_base = OTHER; note = 2'-O-methyladenosine-3'-phosphate
  modified_base 9: mod_base = OTHER; note = 2'-fluoroguanosine-3'-phosphate
  modified_base 10: mod_base = OTHER; note = 2'-fluorocytidine-3'-phosphate
  modified_base 11: mod_base = OTHER; note = 2'-fluorocytidine-3'-phosphate
  modified_base 12: mod_base = OTHER; note = 2'-O-methyluridine-3'-phosphate
  modified_base 13: mod_base = OTHER; note = 2'-O-methylcytidine-3'-phosphate
  modified_base 14: mod_base = OTHER; note = 2'-O-methyluridine-3'-phosphate
  modified_base 15: mod_base = OTHER; note = 2'-O-methyluridine-3'-phosphate
  modified_base 16: mod_base = OTHER; note = 2'-O-methylcytidine-3'-phosphate
  modified_base 17: mod_base = OTHER; note = 2'-O-methyluridine-3'-phosphate
  modified_base 18: mod_base = OTHER; note = 2'-O-methyluridine-3'-phosphate
  modified_base 19: mod_base = OTHER; note = 2'-O-methyladenosine-3'-phosphate
  modified_base 20: mod_base = OTHER; note = 2'-O-methylcytidine-3'-phosphate
  modified_base 21: mod_base = OTHER; note = 2'-O-methyluridine-3'-phosphate
gaagccaagcctcttcttact

SEQ ID NO: 185 - RNA, 21 nt, synthetic construct
  source 1..21: mol_type = other RNA
  modified_base 1: mod_base = OTHER; note = 2'-O-methyladenosine-3'-phosphorothioate
  modified_base 2: mod_base = OTHER; note = 2'-O-methylguanosine-3'-phosphorothioate
  modified_base 3: mod_base = OTHER; note = 2'-O-methylcytidine-3'-phosphate
  modified_base 4: mod_base = OTHER; note = 2'-O-methylcytidine-3'-phosphate
  modified_base 5: mod_base = OTHER; note = 2'-O-methyladenosine-3'-phosphate
  modified_base 6: mod_base = OTHER; note = 2'-O-methyladenosine-3'-phosphate
  modified_base 7: mod_base = OTHER; note = 2'-fluoroguanosine-3'-phosphate
  modified_base 8: mod_base = OTHER; note = 2'-O-methylcytidine-3'-phosphate
  modified_base 9: mod_base = OTHER; note = 2'-fluorocytidine-3'-phosphate
  modified_base 10: mod_base = OTHER; note = 2'-fluorouridine-3'-phosphate
  modified_base 11: mod_base = OTHER; note = 2'-fluorocytidine-3'-phosphate
  modified_base 12: mod_base = OTHER; note = 2'-O-methyluridine-3'-phosphate
  modified_base 13: mod_base = OTHER; note = 2'-O-methyluridine-3'-phosphate
  modified_base 14: mod_base = OTHER; note = 2'-O-methylcytidine-3'-phosphate
  modified_base 15: mod_base = OTHER; note = 2'-O-methyluridine-3'-phosphate
  modified_base 16: mod_base = OTHER; note = 2'-O-methyluridine-3'-phosphate
  modified_base 17: mod_base = OTHER; note = 2'-O-methyladenosine-3'-phosphate
  modified_base 18: mod_base = OTHER; note = 2'-O-methylcytidine-3'-phosphate
  modified_base 19: mod_base = OTHER; note = 2'-O-methyluridine-3'-phosphate
  modified_base 20: mod_base = OTHER; note = 2'-O-methyluridine-3'-phosphate
  modified_base 21: mod_base = OTHER; note = 2'-O-methylcytidine-3'-phosphate
agccaagcctcttcttacttc

SEQ ID NO: 186 - RNA, 21 nt, synthetic construct
  source 1..21: mol_type = other RNA
  modified_base 1: mod_base = OTHER; note = 2'-O-methylcytidine-3'-phosphorothioate
  modified_base 2: mod_base = OTHER; note = 2'-O-methylcytidine-3'-phosphorothioate
  modified_base 3: mod_base = OTHER; note = 2'-O-methylcytidine-3'-phosphate
  modified_base 4: mod_base = OTHER; note = 2'-O-methyladenosine-3'-phosphate
  modified_base 5: mod_base = OTHER; note = 2'-O-methyladenosine-3'-phosphate
  modified_base 6: mod_base = OTHER; note = 2'-O-methylguanosine-3'-phosphate
  modified_base 7: mod_base = OTHER; note = 2'-fluorocytidine-3'-phosphate
  modified_base 8: mod_base = OTHER; note = 2'-O-methyladenosine-3'-phosphate
  modified_base 9: mod_base = OTHER; note = 2'-fluoroadenosine-3'-phosphate
  modified_base 10: mod_base = OTHER; note = 2'-fluoroguanosine-3'-phosphate
  modified_base 11: mod_base = OTHER; note = 2'-fluorocytidine-3'-phosphate
  modified_base 12: mod_base = OTHER; note = 2'-O-methyladenosine-3'-phosphate
  modified_base 13: mod_base = OTHER; note = 2'-O-methylguanosine-3'-phosphate
  modified_base 14: mod_base = OTHER; note = 2'-O-methyladenosine-3'-phosphate
  modified_base 15: mod_base = OTHER; note = 2'-O-methylcytidine-3'-phosphate
  modified_base 16: mod_base = OTHER; note = 2'-O-methyladenosine-3'-phosphate
  modified_base 17: mod_base = OTHER; note = 2'-O-methyluridine-3'-phosphate
  modified_base 18: mod_base = OTHER; note = 2'-O-methyluridine-3'-phosphate
  modified_base 19: mod_base = OTHER; note = 2'-O-methyluridine-3'-phosphate
  modified_base 20: mod_base = OTHER; note = 2'-O-methyladenosine-3'-phosphate
  modified_base 21: mod_base = OTHER; note = 2'-O-methyluridine-3'-phosphate
cccaagcaagcagacatttat

SEQ ID NO: 187 - RNA, 21 nt, synthetic construct
  source 1..21: mol_type = other RNA
  modified_base 1: mod_base = OTHER; note = 2'-O-methylcytidine-3'-phosphorothioate
  modified_base 2: mod_base = OTHER; note = 2'-O-methylcytidine-3'-phosphorothioate
  modified_base 3: mod_base = OTHER; note = 2'-O-methyladenosine-3'-phosphate
  modified_base 4: mod_base = OTHER; note = 2'-O-methyladenosine-3'-phosphate
  modified_base 5: mod_base = OTHER; note = 2'-O-methylguanosine-3'-phosphate
  modified_base 6: mod_base = OTHER; note = 2'-O-methylcytidine-3'-phosphate
  modified_base 7: mod_base = OTHER; note = 2'-fluoroadenosine-3'-phosphate
  modified_base 8: mod_base = OTHER; note = 2'-O-methyladenosine-3'-phosphate
  modified_base 9: mod_base = OTHER; note = 2'-fluoroguanosine-3'-phosphate
  modified_base 10: mod_base = OTHER; note = 2'-fluorocytidine-3'-phosphate
  modified_base 11: mod_base = OTHER; note = 2'-fluoroadenosine-3'-phosphate
  modified_base 12: mod_base = OTHER; note = 2'-O-methylguanosine-3'-phosphate
  modified_base 13: mod_base = OTHER; note = 2'-O-methyladenosine-3'-phosphate
  modified_base 14: mod_base = OTHER; note = 2'-O-methylcytidine-3'-phosphate
  modified_base 15: mod_base = OTHER; note = 2'-O-methyladenosine-3'-phosphate
  modified_base 16: mod_base = OTHER; note = 2'-O-methyluridine-3'-phosphate
  modified_base 17: mod_base = OTHER; note = 2'-O-methyluridine-3'-phosphate
  modified_base 18: mod_base = OTHER; note = 2'-O-methyluridine-3'-phosphate
  modified_base 19: mod_base = OTHER; note = 2'-O-methyladenosine-3'-phosphate
  modified_base 20: mod_base = OTHER; note = 2'-O-methyluridine-3'-phosphate
  modified_base 21: mod_base = OTHER; note = 2'-O-methylcytidine-3'-phosphate
ccaagcaagcagacatttatc

SEQ ID NO: 188 - RNA, 21 nt, synthetic construct
  source 1..21: mol_type = other RNA
  modified_base 1: mod_base = OTHER; note = 2'-O-methyluridine-3'-phosphorothioate
  modified_base 2: mod_base = OTHER; note = 2'-O-methyluridine-3'-phosphorothioate
  modified_base 3: mod_base = OTHER; note = 2'-O-methyluridine-3'-phosphate
  modified_base 4: mod_base = OTHER; note = 2'-O-methyluridine-3'-phosphate
  modified_base 5: mod_base = OTHER; note = 2'-O-methylguanosine-3'-phosphate
  modified_base 6: mod_base = OTHER; note = 2'-O-methylguanosine-3'-phosphate
  modified_base 7: mod_base = OTHER; note = 2'-fluoroguanosine-3'-phosphate
  modified_base 8: mod_base = OTHER; note = 2'-O-methyluridine-3'-phosphate
  modified_base 9: mod_base = OTHER; note = 2'-fluorocytidine-3'-phosphate
  modified_base 10: mod_base = OTHER; note = 2'-fluorouridine-3'-phosphate
  modified_base 11: mod_base = OTHER; note = 2'-fluoroguanosine-3'-phosphate
  modified_base 12: mod_base = OTHER; note = 2'-O-methyluridine-3'-phosphate
  modified_base 13: mod_base = OTHER; note = 2'-O-methylcytidine-3'-phosphate
  modified_base 14: mod_base = OTHER; note = 2'-O-methylcytidine-3'-phosphate
  modified_base 15: mod_base = OTHER; note = 2'-O-methyluridine-3'-phosphate
  modified_base 16: mod_base = OTHER; note = 2'-O-methylcytidine-3'-phosphate
  modified_base 17: mod_base = OTHER; note = 2'-O-methyluridine-3'-phosphate
  modified_base 18: mod_base = OTHER; note = 2'-O-methylcytidine-3'-phosphate
  modified_base 19: mod_base = OTHER; note = 2'-O-methyluridine-3'-phosphate
  modified_base 20: mod_base = OTHER; note = 2'-O-methylguanosine-3'-phosphate
  modified_base 21: mod_base = OTHER; note = 2'-O-methyluridine-3'-phosphate
ttttgggtctgtcctctctgt

SEQ ID NO: 189 - RNA, 21 nt, synthetic construct
  source 1..21: mol_type = other RNA
  modified_base 1: mod_base = OTHER; note = 2'-O-methyluridine-3'-phosphorothioate
  modified_base 2: mod_base = OTHER; note = 2'-O-methylcytidine-3'-phosphorothioate
  modified_base 3: mod_base = OTHER; note = 2'-O-methyluridine-3'-phosphate
  modified_base 4: mod_base = OTHER; note = 2'-O-methylguanosine-3'-phosphate
  modified_base 5: mod_base = OTHER; note = 2'-O-methyluridine-3'-phosphate
  modified_base 6: mod_base = OTHER; note = 2'-O-methylcytidine-3'-phosphate
  modified_base 7: mod_base = OTHER; note = 2'-fluorocytidine-3'-phosphate
  modified_base 8: mod_base = OTHER; note = 2'-O-methyluridine-3'-phosphate
  modified_base 9: mod_base = OTHER; note = 2'-fluorocytidine-3'-phosphate
  modified_base 10: mod_base = OTHER; note = 2'-fluorouridine-3'-phosphate
  modified_base 11: mod_base = OTHER; note = 2'-fluorocytidine-3'-phosphate
  modified_base 12: mod_base = OTHER; note = 2'-O-methyluridine-3'-phosphate
  modified_base 13: mod_base = OTHER; note = 2'-O-methylguanosine-3'-phosphate
  modified_base 14: mod_base = OTHER; note = 2'-O-methyluridine-3'-phosphate
  modified_base 15: mod_base = OTHER; note = 2'-O-methyluridine-3'-phosphate
  modified_base 16: mod_base = OTHER; note = 2'-O-methylguanosine-3'-phosphate
  modified_base 17: mod_base = OTHER; note = 2'-O-methylcytidine-3'-phosphate
  modified_base 18: mod_base = OTHER; note = 2'-O-methylcytidine-3'-phosphate
  modified_base 19: mod_base = OTHER; note = 2'-O-methyluridine-3'-phosphate
  modified_base 20: mod_base = OTHER; note = 2'-O-methyluridine-3'-phosphate
  modified_base 21: mod_base = OTHER; note = 2'-O-methyluridine-3'-phosphate
tctgtcctctctgttgccttt

SEQ ID NO: 190 - RNA, 21 nt, synthetic construct
  source 1..21: mol_type = other RNA
  modified_base 1: mod_base = OTHER; note = 2'-O-methylcytidine-3'-phosphorothioate
  modified_base 2: mod_base = OTHER; note = 2'-O-methyluridine-3'-phosphorothioate
  modified_base 3: mod_base = OTHER; note = 2'-O-methylguanosine-3'-phosphate
  modified_base 4: mod_base = OTHER; note = 2'-O-methyluridine-3'-phosphate
  modified_base 5: mod_base = OTHER; note = 2'-O-methylcytidine-3'-phosphate
  modified_base 6: mod_base = OTHER; note = 2'-O-methylcytidine-3'-phosphate
  modified_base 7: mod_base = OTHER; note = 2'-fluorouridine-3'-phosphate
  modified_base 8: mod_base = OTHER; note = 2'-O-methylcytidine-3'-phosphate
  modified_base 9: mod_base = OTHER; note = 2'-fluorouridine-3'-phosphate
  modified_base 10: mod_base = OTHER; note = 2'-fluorocytidine-3'-phosphate
  modified_base 11: mod_base = OTHER; note = 2'-fluorouridine-3'-phosphate
  modified_base 12: mod_base = OTHER; note = 2'-O-methylguanosine-3'-phosphate
  modified_base 13: mod_base = OTHER; note = 2'-O-methyluridine-3'-phosphate
  modified_base 14: mod_base = OTHER; note = 2'-O-methyluridine-3'-phosphate
  modified_base 15: mod_base = OTHER; note = 2'-O-methylguanosine-3'-phosphate
  modified_base 16: mod_base = OTHER; note = 2'-O-methylcytidine-3'-phosphate
  modified_base 17: mod_base = OTHER; note = 2'-O-methylcytidine-3'-phosphate
  modified_base 18: mod_base = OTHER; note = 2'-O-methyluridine-3'-phosphate
  modified_base 19: mod_base = OTHER; note = 2'-O-methyluridine-3'-phosphate
  modified_base 20: mod_base = OTHER; note = 2'-O-methyluridine-3'-phosphate
  modified_base 21: mod_base = OTHER; note = 2'-O-methyluridine-3'-phosphate
ctgtcctctctgttgcctttt

SEQ ID NO: 191 - RNA, 21 nt, synthetic construct
  source 1..21: mol_type = other RNA
  modified_base 1: mod_base = OTHER; note = 2'-O-methyluridine-3'-phosphorothioate
  modified_base 2: mod_base = OTHER; note = 2'-O-methylguanosine-3'-phosphorothioate
  modified_base 3: mod_base = OTHER; note = 2'-O-methyluridine-3'-phosphate
  modified_base 4: mod_base = OTHER; note = 2'-O-methylcytidine-3'-phosphate
  modified_base 5: mod_base = OTHER; note = 2'-O-methylcytidine-3'-phosphate
  modified_base 6: mod_base = OTHER; note = 2'-O-methyluridine-3'-phosphate
  modified_base 7: mod_base = OTHER; note = 2'-fluorocytidine-3'-phosphate
  modified_base 8: mod_base = OTHER; note = 2'-O-methyluridine-3'-phosphate
  modified_base 9: mod_base = OTHER; note = 2'-fluorocytidine-3'-phosphate
  modified_base 10: mod_base = OTHER; note = 2'-fluorouridine-3'-phosphate
  modified_base 11: mod_base = OTHER; note = 2'-fluoroguanosine-3'-phosphate
  modified_base 12: mod_base = OTHER; note = 2'-O-methyluridine-3'-phosphate
  modified_base 13: mod_base = OTHER; note = 2'-O-methyluridine-3'-phosphate
  modified_base 14: mod_base = OTHER; note = 2'-O-methylguanosine-3'-phosphate
  modified_base 15: mod_base = OTHER; note = 2'-O-methylcytidine-3'-phosphate
  modified_base 16: mod_base = OTHER; note = 2'-O-methylcytidine-3'-phosphate
  modified_base 17: mod_base = OTHER; note = 2'-O-methyluridine-3'-phosphate
  modified_base 18: mod_base = OTHER; note = 2'-O-methyluridine-3'-phosphate
  modified_base 19: mod_base = OTHER; note = 2'-O-methyluridine-3'-phosphate
  modified_base 20: mod_base = OTHER; note = 2'-O-methyluridine-3'-phosphate
  modified_base 21: mod_base = OTHER; note = 2'-O-methyluridine-3'-phosphate
tgtcctctctgttgccttttt

SEQ ID NO: 192 - RNA, 21 nt, synthetic construct
  source 1..21: mol_type = other RNA
  modified_base 1: mod_base = OTHER; note = 2'-O-methylguanosine-3'-phosphorothioate
  modified_base 2: mod_base = OTHER; note = 2'-O-methyluridine-3'-phosphorothioate
  modified_base 3: mod_base = OTHER; note = 2'-O-methylcytidine-3'-phosphate
  modified_base 4: mod_base = OTHER; note = 2'-O-methylcytidine-3'-phosphate
  modified_base 5: mod_base = OTHER; note = 2'-O-methyluridine-3'-phosphate
  modified_base 6: mod_base = OTHER; note = 2'-O-methylcytidine-3'-phosphate
  modified_base 7: mod_base = OTHER; note = 2'-fluorouridine-3'-phosphate
  modified_base 8: mod_base = OTHER; note = 2'-O-methylcytidine-3'-phosphate
  modified_base 9: mod_base = OTHER; note = 2'-fluorouridine-3'-phosphate
  modified_base 10: mod_base = OTHER; note = 2'-fluoroguanosine-3'-phosphate
  modified_base 11: mod_base = OTHER; note = 2'-fluorouridine-3'-phosphate
  modified_base 12: mod_base = OTHER; note = 2'-O-methyluridine-3'-phosphate
  modified_base 13: mod_base = OTHER; note = 2'-O-methylguanosine-3'-phosphate
  modified_base 14: mod_base = OTHER; note = 2'-O-methylcytidine-3'-phosphate
  modified_base 15: mod_base = OTHER; note = 2'-O-methylcytidine-3'-phosphate
  modified_base 16: mod_base = OTHER; note = 2'-O-methyluridine-3'-phosphate
  modified_base 17: mod_base = OTHER; note = 2'-O-methyluridine-3'-phosphate
  modified_base 18: mod_base = OTHER; note = 2'-O-methyluridine-3'-phosphate
  modified_base 19: mod_base = OTHER; note = 2'-O-methyluridine-3'-phosphate
  modified_base 20: mod_base = OTHER; note = 2'-O-methyluridine-3'-phosphate
  modified_base 21: mod_base = OTHER; note = 2'-O-methyladenosine-3'-phosphate
gtcctctctgttgccttttta

SEQ ID NO: 193 - RNA, 21 nt, synthetic construct
  source 1..21: mol_type = other RNA
  modified_base 1: mod_base = OTHER; note = 2'-O-methylcytidine-3'-phosphorothioate
  modified_base 2: mod_base = OTHER; note = 2'-O-methylcytidine-3'-phosphorothioate
  modified_base 3: mod_base = OTHER; note = 2'-O-methyluridine-3'-phosphate
  modified_base 4: mod_base = OTHER; note = 2'-O-methylcytidine-3'-phosphate
  modified_base 5: mod_base = OTHER; note = 2'-O-methyluridine-3'-phosphate
  modified_base 6: mod_base = OTHER; note = 2'-O-methylcytidine-3'-phosphate
  modified_base 7: mod_base = OTHER; note = 2'-fluorouridine-3'-phosphate
  modified_base 8: mod_base = OTHER; note = 2'-O-methylguanosine-3'-phosphate
  modified_base 9: mod_base = OTHER; note = 2'-fluorouridine-3'-phosphate
  modified_base 10: mod_base = OTHER; note = 2'-fluorouridine-3'-phosphate
  modified_base 11: mod_base = OTHER; note = 2'-fluoroguanosine-3'-phosphate
  modified_base 12: mod_base = OTHER; note = 2'-O-methylcytidine-3'-phosphate
  modified_base 13: mod_base = OTHER; note = 2'-O-methylcytidine-3'-phosphate
  modified_base 14: mod_base = OTHER; note = 2'-O-methyluridine-3'-phosphate
  modified_base 15: mod_base = OTHER; note = 2'-O-methyluridine-3'-phosphate
  modified_base 16: mod_base = OTHER; note = 2'-O-methyluridine-3'-phosphate
  modified_base 17: mod_base = OTHER; note = 2'-O-methyluridine-3'-phosphate
  modified_base 18: mod_base = OTHER; note = 2'-O-methyluridine-3'-phosphate
  modified_base 19: mod_base = OTHER; note = 2'-O-methyladenosine-3'-phosphate
  modified_base 20: mod_base = OTHER; note = 2'-O-methylcytidine-3'-phosphate
  modified_base 21: mod_base = OTHER; note = 2'-O-methyladenosine-3'-phosphate
cctctctgttgcctttttaca

SEQ ID NO: 194 - RNA, 21 nt, synthetic construct
  source 1..21: mol_type = other RNA
  modified_base 1: mod_base = OTHER; note = 2'-O-methylguanosine-3'-phosphorothioate
  modified_base 2: mod_base = OTHER; note = 2'-O-methyluridine-3'-phosphorothioate
  modified_base 3: mod_base = OTHER; note = 2'-O-methyluridine-3'-phosphate
  modified_base 4: mod_base = OTHER; note = 2'-O-methylguanosine-3'-phosphate
  modified_base 5: mod_base = OTHER; note = 2'-O-methylcytidine-3'-phosphate
  modified_base 6: mod_base = OTHER; note = 2'-O-methylcytidine-3'-phosphate
  modified_base 7: mod_base = OTHER; note = 2'-fluorouridine-3'-phosphate
  modified_base 8: mod_base = OTHER; note = 2'-O-methyluridine-3'-phosphate
  modified_base 9: mod_base = OTHER; note = 2'-fluorouridine-3'-phosphate
  modified_base 10: mod_base = OTHER; note = 2'-fluorouridine-3'-phosphate
  modified_base 11: mod_base = OTHER; note = 2'-fluorouridine-3'-phosphate
  modified_base 12: mod_base = OTHER; note = 2'-O-methyladenosine-3'-phosphate
  modified_base 13: mod_base = OTHER; note = 2'-O-methylcytidine-3'-phosphate
  modified_base 14: mod_base = OTHER; note = 2'-O-methyladenosine-3'-phosphate
  modified_base 15: mod_base = OTHER; note = 2'-O-methylguanosine-3'-phosphate
  modified_base 16: mod_base = OTHER; note = 2'-O-methylcytidine-3'-phosphate
  modified_base 17: mod_base = OTHER; note = 2'-O-methylcytidine-3'-phosphate
  modified_base 18: mod_base = OTHER; note = 2'-O-methyladenosine-3'-phosphate
  modified_base 19: mod_base = OTHER; note = 2'-O-methyladenosine-3'-phosphate
  modified_base 20: mod_base = OTHER; note = 2'-O-methylcytidine-3'-phosphate
  modified_base 21: mod_base = OTHER; note = 2'-O-methyluridine-3'-phosphate
gttgcctttttacagccaact

SEQ ID NO: 195 - RNA, 21 nt, synthetic construct
  source 1..21: mol_type = other RNA
  modified_base 1: mod_base = OTHER; note = 2'-O-methyluridine-3'-phosphorothioate
  modified_base 2: mod_base = OTHER; note = 2'-O-methylguanosine-3'-phosphorothioate
  modified_base 3: mod_base = OTHER; note = 2'-O-methylcytidine-3'-phosphate
  modified_base 4: mod_base = OTHER; note = 2'-O-methylcytidine-3'-phosphate
  modified_base 5: mod_base = OTHER; note = 2'-O-methyluridine-3'-phosphate
  modified_base 6: mod_base = OTHER; note = 2'-O-methyluridine-3'-phosphate
  modified_base 7: mod_base = OTHER; note = 2'-fluorouridine-3'-phosphate
  modified_base 8: mod_base = OTHER; note = 2'-O-methyluridine-3'-phosphate
  modified_base 9: mod_base = OTHER; note = 2'-fluorouridine-3'-phosphate
  modified_base 10: mod_base = OTHER; note = 2'-fluoroadenosine-3'-phosphate
  modified_base 11: mod_base = OTHER; note = 2'-fluorocytidine-3'-phosphate
  modified_base 12: mod_base = OTHER; note = 2'-O-methyladenosine-3'-phosphate
  modified_base 13: mod_base = OTHER; note = 2'-O-methylguanosine-3'-phosphate
  modified_base 14: mod_base = OTHER; note = 2'-O-methylcytidine-3'-phosphate
  modified_base 15: mod_base = OTHER; note = 2'-O-methylcytidine-3'-phosphate
  modified_base 16: mod_base = OTHER; note = 2'-O-methyladenosine-3'-phosphate
  modified_base 17: mod_base = OTHER; note = 2'-O-methyladenosine-3'-phosphate
  modified_base 18: mod_base = OTHER; note = 2'-O-methylcytidine-3'-phosphate
  modified_base 19: mod_base = OTHER; note = 2'-O-methyluridine-3'-phosphate
  modified_base 20: mod_base = OTHER; note = 2'-O-methyluridine-3'-phosphate
  modified_base 21: mod_base = OTHER; note = 2'-O-methyluridine-3'-phosphate
tgcctttttacagccaacttt

SEQ ID NO: 196 - RNA, 21 nt, synthetic construct
  source 1..21: mol_type = other RNA
  modified_base 1: mod_base = OTHER; note = 2'-O-methylcytidine-3'-phosphorothioate
  modified_base 2: mod_base = OTHER; note = 2'-O-methylcytidine-3'-phosphorothioate
  modified_base 3: mod_base = OTHER; note = 2'-O-methyluridine-3'-phosphate
  modified_base 4: mod_base = OTHER; note = 2'-O-methyluridine-3'-phosphate
  modified_base 5: mod_base = OTHER; note = 2'-O-methyluridine-3'-phosphate
  modified_base 6: mod_base = OTHER; note = 2'-O-methyluridine-3'-phosphate
  modified_base 7: mod_base = OTHER; note = 2'-fluorouridine-3'-phosphate
  modified_base 8: mod_base = OTHER; note = 2'-O-methyladenosine-3'-phosphate
  modified_base 9: mod_base = OTHER; note = 2'-fluorocytidine-3'-phosphate
  modified_base 10: mod_base = OTHER; note = 2'-fluoroadenosine-3'-phosphate
  modified_base 11: mod_base = OTHER; note = 2'-fluoroguanosine-3'-phosphate
  modified_base 12: mod_base = OTHER; note = 2'-O-methylcytidine-3'-phosphate
  modified_base 13: mod_base = OTHER; note = 2'-O-methylcytidine-3'-phosphate
  modified_base 14: mod_base = OTHER; note = 2'-O-methyladenosine-3'-phosphate
  modified_base 15: mod_base = OTHER; note = 2'-O-methyladenosine-3'-phosphate
  modified_base 16: mod_base = OTHER; note = 2'-O-methylcytidine-3'-phosphate
  modified_base 17: mod_base = OTHER; note = 2'-O-methyluridine-3'-phosphate
  modified_base 18: mod_base = OTHER; note = 2'-O-methyluridine-3'-phosphate
  modified_base 19: mod_base = OTHER; note = 2'-O-methyluridine-3'-phosphate
  modified_base 20: mod_base = OTHER; note = 2'-O-methyluridine-3'-phosphate
  modified_base 21: mod_base = OTHER; note = 2'-O-methylcytidine-3'-phosphate
cctttttacagccaacttttc

SEQ ID NO: 197 - RNA, 21 nt, synthetic construct
  source 1..21: mol_type = other RNA
  modified_base 1: mod_base = OTHER; note = 2'-O-methyluridine-3'-phosphorothioate
  modified_base 2: mod_base = OTHER; note = 2'-O-methyluridine-3'-phosphorothioate
  modified_base 3: mod_base = OTHER; note = 2'-O-methyluridine-3'-phosphate
  modified_base 4: mod_base = OTHER; note = 2'-O-methyluridine-3'-phosphate
  modified_base 5: mod_base = OTHER; note = 2'-O-methyladenosine-3'-phosphate
  modified_base 6: mod_base = OTHER; note = 2'-O-methylcytidine-3'-phosphate
  modified_base 7: mod_base = OTHER; note = 2'-fluoroadenosine-3'-phosphate
  modified_base 8: mod_base = OTHER; note = 2'-O-methylguanosine-3'-phosphate
  modified_base 9: mod_base = OTHER; note = 2'-fluorocytidine-3'-phosphate
  modified_base 10: mod_base = OTHER; note = 2'-fluorocytidine-3'-phosphate
  modified_base 11: mod_base = OTHER; note = 2'-fluoroadenosine-3'-phosphate
  modified_base 12: mod_base = OTHER; note = 2'-O-methyladenosine-3'-phosphate
  modified_base 13: mod_base = OTHER; note = 2'-O-methylcytidine-3'-phosphate
  modified_base 14: mod_base = OTHER; note = 2'-O-methyluridine-3'-phosphate
  modified_base 15: mod_base = OTHER; note = 2'-O-methyluridine-3'-phosphate
  modified_base 16: mod_base = OTHER; note = 2'-O-methyluridine-3'-phosphate
  modified_base 17: mod_base = OTHER; note = 2'-O-methyluridine-3'-phosphate
  modified_base 18: mod_base = OTHER; note = 2'-O-methylcytidine-3'-phosphate
  modified_base 19: mod_base = OTHER; note = 2'-O-methyluridine-3'-phosphate
  modified_base 20: mod_base = OTHER; note = 2'-O-methyladenosine-3'-phosphate
  modified_base 21: mod_base = OTHER; note = 2'-O-methylguanosine-3'-phosphate
ttttacagccaacttttctag

SEQ ID NO: 198 - RNA, 21 nt, synthetic construct
  source 1..21: mol_type = other RNA
  modified_base 1: mod_base = OTHER; note = 2'-O-methylguanosine-3'-phosphorothioate
  modified_base 2: mod_base = OTHER; note = 2'-O-methylcytidine-3'-phosphorothioate
  modified_base 3: mod_base = OTHER; note = 2'-O-methylcytidine-3'-phosphate
  modified_base 4: mod_base = OTHER; note = 2'-O-methyladenosine-3'-phosphate
  modified_base 5: mod_base = OTHER; note = 2'-O-methyladenosine-3'-phosphate
  modified_base 6: mod_base = OTHER; note = 2'-O-methylcytidine-3'-phosphate
  modified_base 7: mod_base = OTHER; note = 2'-fluorouridine-3'-phosphate
  modified_base 8: mod_base = OTHER; note = 2'-O-methyluridine-3'-phosphate
  modified_base 9: mod_base = OTHER; note = 2'-fluorouridine-3'-phosphate
  modified_base 10: mod_base = OTHER; note = 2'-fluorouridine-3'-phosphate
  modified_base 11: mod_base = OTHER; note = 2'-fluorocytidine-3'-phosphate
  modified_base 12: mod_base = OTHER; note = 2'-O-methyluridine-3'-phosphate
  modified_base 13: mod_base = OTHER; note = 2'-O-methyladenosine-3'-phosphate
  modified_base 14: mod_base = OTHER; note = 2'-O-methylguanosine-3'-phosphate
  modified_base 15: mod_base = OTHER; note = 2'-O-methyladenosine-3'-phosphate
  modified_base 16: mod_base = OTHER; note = 2'-O-methylcytidine-3'-phosphate
  modified_base 17: mod_base = OTHER; note = 2'-O-methylcytidine-3'-phosphate
  modified_base 18: mod_base = OTHER; note = 2'-O-methyluridine-3'-phosphate
  modified_base 19: mod_base = OTHER; note = 2'-O-methylguanosine-3'-phosphate
  modified_base 20: mod_base = OTHER; note = 2'-O-methyluridine-3'-phosphate
  modified_base 21: mod_base = OTHER; note = 2'-O-methyluridine-3'-phosphate
gccaacttttctagacctgtt

SEQ ID NO: 199 - RNA, 21 nt, synthetic construct
  source 1..21: mol_type = other RNA
  modified_base 1: mod_base = OTHER; note = 2'-O-methylcytidine-3'-phosphorothioate
  modified_base 2: mod_base = OTHER; note = 2'-O-methylcytidine-3'-phosphorothioate
  modified_base 3: mod_base = OTHER; note = 2'-O-methyladenosine-3'-phosphate
  modified_base 4: mod_base = OTHER; note = 2'-O-methyladenosine-3'-phosphate
  modified_base 5: mod_base = OTHER; note = 2'-O-methylcytidine-3'-phosphate
  modified_base 6: mod_base = OTHER; note = 2'-O-methyluridine-3'-phosphate
  modified_base 7: mod_base = OTHER; note = 2'-fluorouridine-3'-phosphate
  modified_base 8: mod_base = OTHER; note = 2'-O-methyluridine-3'-phosphate
  modified_base 9: mod_base = OTHER; note = 2'-fluorouridine-3'-phosphate
  modified_base 10: mod_base = OTHER; note = 2'-fluorocytidine-3'-phosphate
  modified_base 11: mod_base = OTHER; note = 2'-fluorouridine-3'-phosphate
  modified_base 12: mod_base = OTHER; note = 2'-O-methyladenosine-3'-phosphate
  modified_base 13: mod_base = OTHER; note = 2'-O-methylguanosine-3'-phosphate
  modified_base 14: mod_base = OTHER; note = 2'-O-methyladenosine-3'-phosphate
  modified_base 15: mod_base = OTHER; note = 2'-O-methylcytidine-3'-phosphate
  modified_base 16: mod_base = OTHER; note = 2'-O-methylcytidine-3'-phosphate
  modified_base 17: mod_base = OTHER; note = 2'-O-methyluridine-3'-phosphate
  modified_base 18: mod_base = OTHER; note = 2'-O-methylguanosine-3'-phosphate
  modified_base 19: mod_base = OTHER; note = 2'-O-methyluridine-3'-phosphate
  modified_base 20: mod_base = OTHER; note = 2'-O-methyluridine-3'-phosphate
  modified_base 21: mod_base = OTHER; note = 2'-O-methyluridine-3'-phosphate
ccaacttttctagacctgttt

SEQ ID NO: 200 - RNA, 21 nt, synthetic construct
  source 1..21: mol_type = other RNA
  modified_base 1: mod_base = OTHER; note = 2'-O-methylcytidine-3'-phosphorothioate
  modified_base 2: mod_base = OTHER; note = 2'-O-methyladenosine-3'-phosphorothioate
  modified_base 3: mod_base = OTHER; note = 2'-O-methyladenosine-3'-phosphate
  modified_base 4: mod_base = OTHER; note = 2'-O-methylcytidine-3'-phosphate
  modified_base 5: mod_base = OTHER; note = 2'-O-methyluridine-3'-phosphate
  modified_base 6: mod_base = OTHER; note = 2'-O-methyluridine-3'-phosphate
  modified_base 7: mod_base = OTHER; note = 2'-fluorouridine-3'-phosphate
  modified_base 8: mod_base = OTHER; note = 2'-O-methyluridine-3'-phosphate
  modified_base 9: mod_base = OTHER; note = 2'-fluorocytidine-3'-phosphate
  modified_base 10: mod_base = OTHER; note = 2'-fluorouridine-3'-phosphate
  modified_base 11: mod_base = OTHER; note = 2'-fluoroadenosine-3'-phosphate
  modified_base 12: mod_base = OTHER; note = 2'-O-methylguanosine-3'-phosphate
  modified_base 13: mod_base = OTHER; note = 2'-O-methyladenosine-3'-phosphate
  modified_base 14: mod_base = OTHER; note = 2'-O-methylcytidine-3'-phosphate
  modified_base 15: mod_base = OTHER; note = 2'-O-methylcytidine-3'-phosphate
  modified_base 16: mod_base = OTHER; note = 2'-O-methyluridine-3'-phosphate
  modified_base 17: mod_base = OTHER; note = 2'-O-methylguanosine-3'-phosphate
  modified_base 18: mod_base = OTHER; note = 2'-O-methyluridine-3'-phosphate
  modified_base 19: mod_base = OTHER; note = 2'-O-methyluridine-3'-phosphate
  modified_base 20: mod_base = OTHER; note = 2'-O-methyluridine-3'-phosphate
  modified_base 21: mod_base = OTHER; note = 2'-O-methyluridine-3'-phosphate
caacttttctagacctgtttt

SEQ ID NO: 201 - RNA, 21 nt, synthetic construct
  source 1..21: mol_type = other RNA
  modified_base 1: mod_base = OTHER; note = 2'-O-methyladenosine-3'-phosphorothioate
  modified_base 2: mod_base = OTHER; note = 2'-O-methylcytidine-3'-phosphorothioate
  modified_base 3: mod_base = OTHER; note = 2'-O-methyluridine-3'-phosphate
  modified_base 4: mod_base = OTHER; note = 2'-O-methyluridine-3'-phosphate
  modified_base 5: mod_base = OTHER; note = 2'-O-methyluridine-3'-phosphate
  modified_base 6: mod_base = OTHER; note = 2'-O-methyluridine-3'-phosphate
  modified_base 7: mod_base = OTHER; note = 2'-fluorocytidine-3'-phosphate
  modified_base 8: mod_base = OTHER; note = 2'-O-methyluridine-3'-phosphate
  modified_base 9: mod_base = OTHER; note = 2'-fluoroadenosine-3'-phosphate
  modified_base 10: mod_base = OTHER; note = 2'-fluoroguanosine-3'-phosphate
  modified_base 11: mod_base = OTHER; note = 2'-fluoroadenosine-3'-phosphate
  modified_base 12: mod_base = OTHER; note = 2'-O-methylcytidine-3'-phosphate
  modified_base 13: mod_base = OTHER; note = 2'-O-methylcytidine-3'-phosphate
  modified_base 14: mod_base = OTHER; note = 2'-O-methyluridine-3'-phosphate
  modified_base 15: mod_base = OTHER; note = 2'-O-methylguanosine-3'-phosphate
  modified_base 16: mod_base = OTHER; note = 2'-O-methyluridine-3'-phosphate
  modified_base 17: mod_base = OTHER; note = 2'-O-methyluridine-3'-phosphate
  modified_base 18: mod_base = OTHER; note = 2'-O-methyluridine-3'-phosphate
  modified_base 19: mod_base = OTHER; note = 2'-O-methyluridine-3'-phosphate
  modified_base 20: mod_base = OTHER; note = 2'-O-methylguanosine-3'-phosphate
  modified_base 21: mod_base = OTHER; note = 2'-O-methylcytidine-3'-phosphate
acttttctagacctgttttgc

SEQ ID NO: 202 - RNA, 21 nt, synthetic construct
  source 1..21: mol_type = other RNA
  modified_base 1: mod_base = OTHER; note = 2'-O-methyluridine-3'-phosphorothioate
  modified_base 2: mod_base = OTHER; note = 2'-O-methyluridine-3'-phosphorothioate
  modified_base 3: mod_base = OTHER; note = 2'-O-methyluridine-3'-phosphate
  modified_base 4: mod_base = OTHER; note = 2'-O-methyluridine-3'-phosphate
  modified_base 5: mod_base = OTHER; note = 2'-O-methylcytidine-3'-phosphate
  modified_base 6: mod_base = OTHER; note = 2'-O-methyluridine-3'-phosphate
  modified_base 7: mod_base = OTHER; note = 2'-fluoroadenosine-3'-phosphate
  modified_base 8: mod_base = OTHER; note = 2'-O-methylguanosine-3'-phosphate
  modified_base 9: mod_base = OTHER; note = 2'-fluoroadenosine-3'-phosphate
  modified_base 10: mod_base = OTHER; note = 2'-fluorocytidine-3'-phosphate
  modified_base 11: mod_base = OTHER; note = 2'-fluorocytidine-3'-phosphate
  modified_base 12: mod_base = OTHER; note = 2'-O-methyluridine-3'-phosphate
  modified_base 13: mod_base = OTHER; note = 2'-O-methylguanosine-3'-phosphate
  modified_base 14: mod_base = OTHER; note = 2'-O-methyluridine-3'-phosphate
  modified_base 15: mod_base = OTHER; note = 2'-O-methyluridine-3'-phosphate
  modified_base 16: mod_base = OTHER; note = 2'-O-methyluridine-3'-phosphate
  modified_base 17: mod_base = OTHER; note = 2'-O-methyluridine-3'-phosphate
  modified_base 18: mod_base = OTHER; note = 2'-O-methylguanosine-3'-phosphate
  modified_base 19: mod_base = OTHER; note = 2'-O-methylcytidine-3'-phosphate
  modified_base 20: mod_base = OTHER; note = 2'-O-methyluridine-3'-phosphate
  modified_base 21: mod_base = OTHER; note = 2'-O-methyluridine-3'-phosphate
ttttctagacctgttttgctt

SEQ ID NO: 203 - RNA, 21 nt, synthetic construct
  source 1..21: mol_type = other RNA
  modified_base 1: mod_base = OTHER; note = 2'-O-methyluridine-3'-phosphorothioate
  modified_base 2: mod_base = OTHER; note = 2'-O-methyluridine-3'-phosphorothioate
  modified_base 3: mod_base = OTHER; note = 2'-O-methyluridine-3'-phosphate
  modified_base 4: mod_base = OTHER; note = 2'-O-methylcytidine-3'-phosphate
  modified_base 5: mod_base = OTHER; note = 2'-O-methyluridine-3'-phosphate
  modified_base 6: mod_base = OTHER; note = 2'-O-methyladenosine-3'-phosphate
  modified_base 7: mod_base = OTHER; note = 2'-fluoroguanosine-3'-phosphate
  modified_base 8: mod_base = OTHER; note = 2'-O-methyladenosine-3'-phosphate
  modified_base 9: mod_base = OTHER; note = 2'-fluorocytidine-3'-phosphate
  modified_base 10: mod_base = OTHER; note = 2'-fluorocytidine-3'-phosphate
  modified_base 11: mod_base = OTHER; note = 2'-fluorouridine-3'-phosphate
  modified_base 12: mod_base = OTHER; note = 2'-O-methylguanosine-3'-phosphate
  modified_base 13: mod_base = OTHER; note = 2'-O-methyluridine-3'-phosphate
  modified_base 14: mod_base = OTHER; note = 2'-O-methyluridine-3'-phosphate
  modified_base 15: mod_base = OTHER; note = 2'-O-methyluridine-3'-phosphate
  modified_base 16: mod_base = OTHER; note = 2'-O-methyluridine-3'-phosphate
  modified_base 17: mod_base = OTHER; note = 2'-O-methylguanosine-3'-phosphate
  modified_base 18: mod_base = OTHER; note = 2'-O-methylcytidine-3'-phosphate
  modified_base 19: mod_base = OTHER; note = 2'-O-methyluridine-3'-phosphate
  modified_base 20: mod_base = OTHER; note = 2'-O-methyluridine-3'-phosphate
  modified_base 21: mod_base = OTHER; note = 2'-O-methyluridine-3'-phosphate
tttctagacctgttttgcttt

SEQ ID NO: 204 - RNA, 21 nt, synthetic construct
  source 1..21: mol_type = other RNA
  modified_base 1: mod_base = OTHER; note = 2'-O-methyluridine-3'-phosphorothioate
  modified_base 2: mod_base = OTHER; note = 2'-O-methylcytidine-3'-phosphorothioate
  modified_base 3: mod_base = OTHER; note = 2'-O-methyluridine-3'-phosphate
  modified_base 4: mod_base = OTHER; note = 2'-O-methyladenosine-3'-phosphate
  modified_base 5: mod_base = OTHER; note = 2'-O-methylguanosine-3'-phosphate
  modified_base 6: mod_base = OTHER; note = 2'-O-methyladenosine-3'-phosphate
  modified_base 7: mod_base = OTHER; note = 2'-fluorocytidine-3'-phosphate
  modified_base 8: mod_base = OTHER; note = 2'-O-methylcytidine-3'-phosphate
  modified_base 9: mod_base = OTHER; note = 2'-fluorouridine-3'-phosphate
  modified_base 10: mod_base = OTHER; note = 2'-fluoroguanosine-3'-phosphate
  modified_base 11: mod_base = OTHER; note = 2'-fluorouridine-3'-phosphate
  modified_base 12: mod_base = OTHER; note = 2'-O-methyluridine-3'-phosphate
  modified_base 13: mod_base = OTHER; note = 2'-O-methyluridine-3'-phosphate
  modified_base 14: mod_base = OTHER; note = 2'-O-methyluridine-3'-phosphate
  modified_base 15: mod_base = OTHER; note = 2'-O-methylguanosine-3'-phosphate
  modified_base 16: mod_base = OTHER; note = 2'-O-methylcytidine-3'-phosphate
  modified_base 17: mod_base = OTHER; note = 2'-O-methyluridine-3'-phosphate
  modified_base 18: mod_base = OTHER; note = 2'-O-methyluridine-3'-phosphate
  modified_base 19: mod_base = OTHER; note = 2'-O-methyluridine-3'-phosphate
  modified_base 20: mod_base = OTHER; note = 2'-O-methyluridine-3'-phosphate
  modified_base 21: mod_base = OTHER; note = 2'-O-methylguanosine-3'-phosphate
tctagacctgttttgcttttg

SEQ ID NO: 205 - RNA, 21 nt, synthetic construct
  source 1..21: mol_type = other RNA
  modified_base 1: mod_base = OTHER; note = 2'-O-methylcytidine-3'-phosphorothioate
  modified_base 2: mod_base = OTHER; note = 2'-O-methyluridine-3'-phosphorothioate
  modified_base 3: mod_base = OTHER; note = 2'-O-methyladenosine-3'-phosphate
  modified_base 4: mod_base = OTHER; note = 2'-O-methylguanosine-3'-phosphate
  modified_base 5: mod_base = OTHER; note = 2'-O-methyladenosine-3'-phosphate
  modified_base 6: mod_base = OTHER; note = 2'-O-methylcytidine-3'-phosphate
  modified_base 7: mod_base = OTHER; note = 2'-fluorocytidine-3'-phosphate
  modified_base 8: mod_base = OTHER; note = 2'-O-methyluridine-3'-phosphate
  modified_base 9: mod_base = OTHER; note = 2'-fluoroguanosine-3'-phosphate
  modified_base 10: mod_base = OTHER; note = 2'-fluorouridine-3'-phosphate
  modified_base 11: mod_base = OTHER; note = 2'-fluorouridine-3'-phosphate
  modified_base 12: mod_base = OTHER; note = 2'-O-methyluridine-3'-phosphate
  modified_base 13: mod_base = OTHER; note = 2'-O-methyluridine-3'-phosphate
  modified_base 14: mod_base = OTHER; note = 2'-O-methylguanosine-3'-phosphate
  modified_base 15: mod_base = OTHER; note = 2'-O-methylcytidine-3'-phosphate
  modified_base 16: mod_base = OTHER; note = 2'-O-methyluridine-3'-phosphate
  modified_base 17: mod_base = OTHER; note = 2'-O-methyluridine-3'-phosphate
  modified_base 18: mod_base = OTHER; note = 2'-O-methyluridine-3'-phosphate
  modified_base 19: mod_base = OTHER; note = 2'-O-methyluridine-3'-phosphate
  modified_base 20: mod_base = OTHER; note = 2'-O-methylguanosine-3'-phosphate
  modified_base 21: mod_base = OTHER; note = 2'-O-methyluridine-3'-phosphate
ctagacctgttttgcttttgt

SEQ ID NO: 206 - RNA, 21 nt, synthetic construct
  source 1..21: mol_type = other RNA
  modified_base 1: mod_base = OTHER; note = 2'-O-methyluridine-3'-phosphorothioate
  modified_base 2: mod_base = OTHER; note = 2'-O-methyladenosine-3'-phosphorothioate
  modified_base 3: mod_base = OTHER; note = 2'-O-methylguanosine-3'-phosphate
  modified_base 4: mod_base = OTHER; note = 2'-O-methyladenosine-3'-phosphate
  modified_base 5: mod_base = OTHER; note = 2'-O-methylcytidine-3'-phosphate
  modified_base 6: mod_base = OTHER; note = 2'-O-methylcytidine-3'-phosphate
  modified_base 7: mod_base = OTHER; note = 2'-fluorouridine-3'-phosphate
  modified_base 8: mod_base = OTHER; note = 2'-O-methylguanosine-3'-phosphate
  modified_base 9: mod_base = OTHER; note = 2'-fluorouridine-3'-phosphate
  modified_base 10: mod_base = OTHER; note = 2'-fluorouridine-3'-phosphate
  modified_base 11: mod_base = OTHER; note = 2'-fluorouridine-3'-phosphate
  modified_base 12: mod_base = OTHER; note = 2'-O-methyluridine-3'-phosphate
  modified_base 13: mod_base = OTHER; note = 2'-O-methylguanosine-3'-phosphate
  modified_base 14: mod_base = OTHER; note = 2'-O-methylcytidine-3'-phosphate
  modified_base 15: mod_base = OTHER; note = 2'-O-methyluridine-3'-phosphate
  modified_base 16: mod_base = OTHER; note = 2'-O-methyluridine-3'-phosphate
  modified_base 17: mod_base = OTHER; note = 2'-O-methyluridine-3'-phosphate
  modified_base 18: mod_base = OTHER; note = 2'-O-methyluridine-3'-phosphate
  modified_base 19: mod_base = OTHER; note = 2'-O-methylguanosine-3'-phosphate
  modified_base 20: mod_base = OTHER; note = 2'-O-methyluridine-3'-phosphate
  modified_base 21: mod_base = OTHER; note = 2'-O-methyladenosine-3'-phosphate
tagacctgttttgcttttgta

SEQ ID NO: 207 - RNA, 21 nt, synthetic construct
  source 1..21: mol_type = other RNA
  modified_base 1: mod_base = OTHER; note = 2'-O-methyladenosine-3'-phosphorothioate
  modified_base 2: mod_base = OTHER; note = 2'-O-methylguanosine-3'-phosphorothioate
  modified_base 3: mod_base = OTHER; note = 2'-O-methyladenosine-3'-phosphate
  modified_base 4: mod_base = OTHER; note = 2'-O-methylcytidine-3'-phosphate
  modified_base 5: mod_base = OTHER; note = 2'-O-methylcytidine-3'-phosphate
  modified_base 6: mod_base = OTHER; note = 2'-O-methyluridine-3'-phosphate
  modified_base 7: mod_base = OTHER; note = 2'-fluoroguanosine-3'-phosphate
  modified_base 8: mod_base = OTHER; note = 2'-O-methyluridine-3'-phosphate
  modified_base 9: mod_base = OTHER; note = 2'-fluorouridine-3'-phosphate
  modified_base 10: mod_base = OTHER; note = 2'-fluorouridine-3'-phosphate
  modified_base 11: mod_base = OTHER; note = 2'-fluorouridine-3'-phosphate
  modified_base 12: mod_base = OTHER; note = 2'-O-methylguanosine-3'-phosphate
  modified_base 13: mod_base = OTHER; note = 2'-O-methylcytidine-3'-phosphate
  modified_base 14: mod_base = OTHER; note = 2'-O-methyluridine-3'-phosphate
  modified_base 15: mod_base = OTHER; note = 2'-O-methyluridine-3'-phosphate
  modified_base 16: mod_base = OTHER; note = 2'-O-methyluridine-3'-phosphate
  modified_base 17: mod_base = OTHER; note = 2'-O-methyluridine-3'-phosphate
  modified_base 18: mod_base = OTHER; note = 2'-O-methylguanosine-3'-phosphate
  modified_base 19: mod_base = OTHER; note = 2'-O-methyluridine-3'-phosphate
  modified_base 20: mod_base = OTHER; note = 2'-O-methyladenosine-3'-phosphate
  modified_base 21: mod_base = OTHER; note = 2'-O-methyladenosine-3'-phosphate
agacctgttttgcttttgtaa

SEQ ID NO: 208 - RNA, 21 nt, synthetic construct
  source 1..21: mol_type = other RNA
  modified_base 1: mod_base = OTHER; note = 2'-O-methylguanosine-3'-phosphorothioate
  modified_base 2: mod_base = OTHER; note = 2'-O-methyladenosine-3'-phosphorothioate
  modified_base 3: mod_base = OTHER; note = 2'-O-methylcytidine-3'-phosphate
  modified_base 4: mod_base = OTHER; note = 2'-O-methylcytidine-3'-phosphate
  modified_base 5: mod_base = OTHER; note = 2'-O-methyluridine-3'-phosphate
  modified_base 6: mod_base = OTHER; note = 2'-O-methylguanosine-3'-phosphate
  modified_base 7: mod_base = OTHER; note = 2'-fluorouridine-3'-phosphate
  modified_base 8: mod_base = OTHER; note = 2'-O-methyluridine-3'-phosphate
  modified_base 9: mod_base = OTHER; note = 2'-fluorouridine-3'-phosphate
  modified_base 10: mod_base = OTHER; note = 2'-fluorouridine-3'-phosphate
  modified_base 11: mod_base = OTHER; note = 2'-fluoroguanosine-3'-phosphate
  modified_base 12: mod_base = OTHER; note = 2'-O-methylcytidine-3'-phosphate
  modified_base 13: mod_base = OTHER; note = 2'-O-methyluridine-3'-phosphate
  modified_base 14: mod_base = OTHER; note = 2'-O-methyluridine-3'-phosphate
  modified_base 15: mod_base = OTHER; note = 2'-O-methyluridine-3'-phosphate
  modified_base 16: mod_base = OTHER; note = 2'-O-methyluridine-3'-phosphate
  modified_base 17: mod_base = OTHER; note = 2'-O-methylguanosine-3'-phosphate
  modified_base 18: mod_base = OTHER; note = 2'-O-methyluridine-3'-phosphate
  modified_base 19: mod_base = OTHER; note = 2'-O-methyladenosine-3'-phosphate
  modified_base 20: mod_base = OTHER; note = 2'-O-methyladenosine-3'-phosphate
  modified_base 21: mod_base = OTHER; note = 2'-O-methylcytidine-3'-phosphate
gacctgttttgcttttgtaac

SEQ ID NO: 209 - RNA, 21 nt, synthetic construct
  source 1..21: mol_type = other RNA
  modified_base 1: mod_base = OTHER; note = 2'-O-methyladenosine-3'-phosphorothioate
  modified_base 2: mod_base = OTHER; note = 2'-O-methylcytidine-3'-phosphorothioate
  modified_base 3: mod_base = OTHER; note = 2'-O-methylcytidine-3'-phosphate
  modified_base 4: mod_base = OTHER; note = 2'-O-methyluridine-3'-phosphate
  modified_base 5: mod_base = OTHER; note = 2'-O-methylguanosine-3'-phosphate
  modified_base 6: mod_base = OTHER; note = 2'-O-methyluridine-3'-phosphate
  modified_base 7: mod_base = OTHER; note = 2'-fluorouridine-3'-phosphate
  modified_base 8: mod_base = OTHER; note = 2'-O-methyluridine-3'-phosphate
  modified_base 9: mod_base = OTHER; note = 2'-fluorouridine-3'-phosphate
  modified_base 10: mod_base = OTHER; note = 2'-fluoroguanosine-3'-phosphate
  modified_base 11: mod_base = OTHER; note = 2'-fluorocytidine-3'-phosphate
  modified_base 12: mod_base = OTHER; note = 2'-O-methyluridine-3'-phosphate
  modified_base 13: mod_base = OTHER; note = 2'-O-methyluridine-3'-phosphate
  modified_base 14: mod_base = OTHER; note = 2'-O-methyluridine-3'-phosphate
  modified_base 15: mod_base = OTHER; note = 2'-O-methyluridine-3'-phosphate
  modified_base 16: mod_base = OTHER; note = 2'-O-methylguanosine-3'-phosphate
  modified_base 17: mod_base = OTHER; note = 2'-O-methyluridine-3'-phosphate
  modified_base 18: mod_base = OTHER; note = 2'-O-methyladenosine-3'-phosphate
  modified_base 19: mod_base = OTHER; note = 2'-O-methyladenosine-3'-phosphate
  modified_base 20: mod_base = OTHER; note = 2'-O-methylcytidine-3'-phosphate
  modified_base 21: mod_base = OTHER; note = 2'-O-methyluridine-3'-phosphate
acctgttttgcttttgtaact

SEQ ID NO: 210 - RNA, 21 nt, synthetic construct
  source 1..21: mol_type = other RNA
  modified_base 1: mod_base = OTHER; note = 2'-O-methylcytidine-3'-phosphorothioate
  modified_base 2: mod_base = OTHER; note = 2'-O-methyluridine-3'-phosphorothioate
  modified_base 3: mod_base = OTHER; note = 2'-O-methylguanosine-3'-phosphate
  modified_base 4: mod_base = OTHER; note = 2'-O-methyluridine-3'-phosphate
  modified_base 5: mod_base = OTHER; note = 2'-O-methyluridine-3'-phosphate
  modified_base 6: mod_base = OTHER; note = 2'-O-methyluridine-3'-phosphate
  modified_base 7: mod_base = OTHER; note = 2'-fluorouridine-3'-phosphate
  modified_base 8: mod_base = OTHER; note = 2'-O-methylguanosine-3'-phosphate
  modified_base 9: mod_base = OTHER; note = 2'-fluorocytidine-3'-phosphate
  modified_base 10: mod_base = OTHER; note = 2'-fluorouridine-3'-phosphate
  modified_base 11: mod_base = OTHER; note = 2'-fluorouridine-3'-phosphate
  modified_base 12: mod_base = OTHER; note = 2'-O-methyluridine-3'-phosphate
  modified_base 13: mod_base = OTHER; note = 2'-O-methyluridine-3'-phosphate
  modified_base 14: mod_base = OTHER; note = 2'-O-methylguanosine-3'-phosphate
  modified_base 15: mod_base = OTHER; note = 2'-O-methyluridine-3'-phosphate
  modified_base 16: mod_base = OTHER; note = 2'-O-methyladenosine-3'-phosphate
  modified_base 17: mod_base = OTHER; note = 2'-O-methyladenosine-3'-phosphate
  modified_base 18: mod_base = OTHER; note = 2'-O-methylcytidine-3'-phosphate
  modified_base 19: mod_base = OTHER; note = 2'-O-methyluridine-3'-phosphate
  modified_base 20: mod_base = OTHER; note = 2'-O-methyluridine-3'-phosphate
  modified_base 21: mod_base = OTHER; note = 2'-O-methylguanosine-3'-phosphate
ctgttttgcttttgtaacttg

SEQ ID NO: 211 - RNA, 21 nt, synthetic construct
  source 1..21: mol_type = other RNA
  modified_base 1: mod_base = OTHER; note = 2'-O-methylguanosine-3'-phosphorothioate
  modified_base 2: mod_base = OTHER; note = 2'-O-methyluridine-3'-phosphorothioate
  modified_base 3: mod_base = OTHER; note = 2'-O-methyluridine-3'-phosphate
  modified_base 4: mod_base = OTHER; note = 2'-O-methyluridine-3'-phosphate
  modified_base 5: mod_base = OTHER; note = 2'-O-methyluridine-3'-phosphate
  modified_base 6: mod_base = OTHER; note = 2'-O-methylguanosine-3'-phosphate
  modified_base 7: mod_base = OTHER; note = 2'-fluorocytidine-3'-phosphate
  modified_base 8: mod_base = OTHER; note = 2'-O-methyluridine-3'-phosphate
  modified_base 9: mod_base = OTHER; note = 2'-fluorouridine-3'-phosphate
  modified_base 10: mod_base = OTHER; note = 2'-fluorouridine-3'-phosphate
  modified_base 11: mod_base = OTHER; note = 2'-fluorouridine-3'-phosphate
  modified_base 12: mod_base = OTHER; note = 2'-O-methylguanosine-3'-phosphate
  modified_base 13: mod_base = OTHER; note = 2'-O-methyluridine-3'-phosphate
  modified_base 14: mod_base = OTHER; note = 2'-O-methyladenosine-3'-phosphate
  modified_base 15: mod_base = OTHER; note = 2'-O-methyladenosine-3'-phosphate
  modified_base 16: mod_base = OTHER; note = 2'-O-methylcytidine-3'-phosphate
  modified_base 17: mod_base = OTHER; note = 2'-O-methyluridine-3'-phosphate
  modified_base 18: mod_base = OTHER; note = 2'-O-methyluridine-3'-phosphate
  modified_base 19: mod_base = OTHER; note = 2'-O-methylguanosine-3'-phosphate
  modified_base 20: mod_base = OTHER; note = 2'-O-methyladenosine-3'-phosphate
  modified_base 21: mod_base = OTHER; note = 2'-O-methyladenosine-3'-phosphate
gttttgcttttgtaacttgaa

SEQ ID NO: 212 - RNA, 21 nt, synthetic construct
  source 1..21: mol_type = other RNA
  modified_base 1: mod_base = OTHER; note = 2'-O-methyluridine-3'-phosphorothioate
  modified_base 2: mod_base = OTHER; note = 2'-O-methyluridine-3'-phosphorothioate
  modified_base 3: mod_base = OTHER; note = 2'-O-methyluridine-3'-phosphate
  modified_base 4: mod_base = OTHER; note = 2'-O-methylguanosine-3'-phosphate
  modified_base 5: mod_base = OTHER; note = 2'-O-methylcytidine-3'-phosphate
  modified_base 6: mod_base = OTHER; note = 2'-O-methyluridine-3'-phosphate
  modified_base 7: mod_base = OTHER; note = 2'-fluorouridine-3'-phosphate
  modified_base 8: mod_base = OTHER; note = 2'-O-methyluridine-3'-phosphate
  modified_base 9: mod_base = OTHER; note = 2'-fluorouridine-3'-phosphate
  modified_base 10: mod_base = OTHER; note = 2'-fluoroguanosine-3'-phosphate
  modified_base 11: mod_base = OTHER; note = 2'-fluorouridine-3'-phosphate
  modified_base 12: mod_base = OTHER; note = 2'-O-methyladenosine-3'-phosphate
  modified_base 13: mod_base = OTHER; note = 2'-O-methyladenosine-3'-phosphate
  modified_base 14: mod_base = OTHER; note = 2'-O-methylcytidine-3'-phosphate
  modified_base 15: mod_base = OTHER; note = 2'-O-methyluridine-3'-phosphate
  modified_base 16: mod_base = OTHER; note = 2'-O-methyluridine-3'-phosphate
  modified_base 17: mod_base = OTHER; note = 2'-O-methylguanosine-3'-phosphate
  modified_base 18: mod_base = OTHER; note = 2'-O-methyladenosine-3'-phosphate
  modified_base 19: mod_base = OTHER; note = 2'-O-methyladenosine-3'-phosphate
  modified_base 20: mod_base = OTHER; note = 2'-O-methylguanosine-3'-phosphate
  modified_base 21: mod_base = OTHER; note = 2'-O-methyladenosine-3'-phosphate
tttgcttttgtaacttgaaga

SEQ ID NO: 213 - RNA, 21 nt, synthetic construct
  source 1..21: mol_type = other RNA
  modified_base 1: mod_base = OTHER; note = 2'-O-methyluridine-3'-phosphorothioate
  modified_base 2: mod_base = OTHER; note = 2'-O-methyluridine-3'-phosphorothioate
  modified_base 3: mod_base = OTHER; note = 2'-O-methylguanosine-3'-phosphate
  modified_base 4: mod_base = OTHER; note = 2'-O-methylcytidine-3'-phosphate
  modified_base 5: mod_base = OTHER; note = 2'-O-methyluridine-3'-phosphate
  modified_base 6: mod_base = OTHER; note = 2'-O-methyluridine-3'-phosphate
  modified_base 7: mod_base = OTHER; note = 2'-fluorouridine-3'-phosphate
  modified_base 8: mod_base = OTHER; note = 2'-O-methyluridine-3'-phosphate
  modified_base 9: mod_base = OTHER; note = 2'-fluoroguanosine-3'-phosphate
  modified_base 10: mod_base = OTHER; note = 2'-fluorouridine-3'-phosphate
  modified_base 11: mod_base = OTHER; note = 2'-fluoroadenosine-3'-phosphate
  modified_base 12: mod_base = OTHER; note = 2'-O-methyladenosine-3'-phosphate
  modified_base 13: mod_base = OTHER; note = 2'-O-methylcytidine-3'-phosphate
  modified_base 14: mod_base = OTHER; note = 2'-O-methyluridine-3'-phosphate
  modified_base 15: mod_base = OTHER; note = 2'-O-methyluridine-3'-phosphate
  modified_base 16: mod_base = OTHER; note = 2'-O-methylguanosine-3'-phosphate
  modified_base 17: mod_base = OTHER; note = 2'-O-methyladenosine-3'-phosphate
  modified_base 18: mod_base = OTHER; note = 2'-O-methyladenosine-3'-phosphate
  modified_base 19: mod_base = OTHER; note = 2'-O-methylguanosine-3'-phosphate
  modified_base 20: mod_base = OTHER; note = 2'-O-methyladenosine-3'-phosphate
  modified_base 21: mod_base = OTHER; note = 2'-O-methyluridine-3'-phosphate
ttgcttttgtaacttgaagat

SEQ ID NO: 214 - RNA, 21 nt, synthetic construct
  source 1..21: mol_type = other RNA
  modified_base 1: mod_base = OTHER; note = 2'-O-methylcytidine-3'-phosphorothioate
  modified_base 2: mod_base = OTHER; note = 2'-O-methyluridine-3'-phosphorothioate
  modified_base 3: mod_base = OTHER; note = 2'-O-methyluridine-3'-phosphate
  modified_base 4: mod_base = OTHER; note = 2'-O-methyluridine-3'-phosphate
  modified_base 5: mod_base = OTHER; note = 2'-O-methyluridine-3'-phosphate
  modified_base 6: mod_base = OTHER; note = 2'-O-methylguanosine-3'-phosphate
  modified_base 7: mod_base = OTHER; note = 2'-fluorouridine-3'-phosphate
  modified_base 8: mod_base = OTHER; note = 2'-O-methyladenosine-3'-phosphate
  modified_base 9: mod_base = OTHER; note = 2'-fluoroadenosine-3'-phosphate
  modified_base 10: mod_base = OTHER; note = 2'-fluorocytidine-3'-phosphate
  modified_base 11: mod_base = OTHER; note = 2'-fluorouridine-3'-phosphate
  modified_base 12: mod_base = OTHER; note = 2'-O-methyluridine-3'-phosphate
  modified_base 13: mod_base = OTHER; note = 2'-O-methylguanosine-3'-phosphate
  modified_base 14: mod_base = OTHER; note = 2'-O-methyladenosine-3'-phosphate
  modified_base 15: mod_base = OTHER; note = 2'-O-methyladenosine-3'-phosphate
  modified_base 16: mod_base = OTHER; note = 2'-O-methylguanosine-3'-phosphate
  modified_base 17: mod_base = OTHER; note = 2'-O-methyladenosine-3'-phosphate
  modified_base 18: mod_base = OTHER; note = 2'-O-methyluridine-3'-phosphate
  modified_base 19: mod_base = OTHER; note = 2'-O-methyladenosine-3'-phosphate
  modified_base 20: mod_base = OTHER; note = 2'-O-methyluridine-3'-phosphate
  modified_base 21: mod_base = OTHER; note = 2'-O-methyluridine-3'-phosphate
cttttgtaacttgaagatatt

SEQ ID NO: 215 - RNA, 21 nt, synthetic construct
  source 1..21: mol_type = other RNA
  modified_base 1: mod_base = OTHER; note = 2'-O-methyluridine-3'-phosphorothioate
  modified_base 2: mod_base = OTHER; note = 2'-O-methyluridine-3'-phosphorothioate
  modified_base 3: mod_base = OTHER; note = 2'-O-methyluridine-3'-phosphate
  modified_base 4: mod_base = OTHER; note = 2'-O-methyluridine-3'-phosphate
  modified_base 5: mod_base = OTHER; note = 2'-O-methylguanosine-3'-phosphate
  modified_base 6: mod_base = OTHER; note = 2'-O-methyluridine-3'-phosphate
  modified_base 7: mod_base = OTHER; note = 2'-fluoroadenosine-3'-phosphate
  modified_base 8: mod_base = OTHER; note = 2'-O-methyladenosine-3'-phosphate
  modified_base 9: mod_base = OTHER; note = 2'-fluorocytidine-3'-phosphate
  modified_base 10: mod_base = OTHER; note = 2'-fluorouridine-3'-phosphate
  modified_base 11: mod_base = OTHER; note = 2'-fluorouridine-3'-phosphate
  modified_base 12: mod_base = OTHER; note = 2'-O-methylguanosine-3'-phosphate
  modified_base 13: mod_base = OTHER; note = 2'-O-methyladenosine-3'-phosphate
  modified_base 14: mod_base = OTHER; note = 2'-O-methyladenosine-3'-phosphate
  modified_base 15: mod_base = OTHER; note = 2'-O-methylguanosine-3'-phosphate
  modified_base 16: mod_base = OTHER; note = 2'-O-methyladenosine-3'-phosphate
  modified_base 17: mod_base = OTHER; note = 2'-O-methyluridine-3'-phosphate
  modified_base 18: mod_base = OTHER; note = 2'-O-methyladenosine-3'-phosphate
  modified_base 19: mod_base = OTHER; note = 2'-O-methyluridine-3'-phosphate
  modified_base 20: mod_base = OTHER; note = 2'-O-methyluridine-3'-phosphate
  modified_base 21: mod_base = OTHER; note = 2'-O-methyluridine-3'-phosphate
ttttgtaacttgaagatattt

SEQ ID NO: 216 - RNA, 21 nt, synthetic construct
  source 1..21: mol_type = other RNA
  modified_base 1: mod_base = OTHER; note = 2'-O-methyluridine-3'-phosphorothioate
  modified_base 2: mod_base = OTHER; note = 2'-O-methyluridine-3'-phosphorothioate
  modified_base 3: mod_base = OTHER; note = 2'-O-methyluridine-3'-phosphate
  modified_base 4: mod_base = OTHER; note = 2'-O-methylguanosine-3'-phosphate
  modified_base 5: mod_base = OTHER; note = 2'-O-methyluridine-3'-phosphate
  modified_base 6: mod_base = OTHER; note = 2'-O-methyladenosine-3'-phosphate
  modified_base 7: mod_base = OTHER; note = 2'-fluoroadenosine-3'-phosphate
  modified_base 8: mod_base = OTHER; note = 2'-O-methylcytidine-3'-phosphate
  modified_base 9: mod_base = OTHER; note = 2'-fluorouridine-3'-phosphate
  modified_base 10: mod_base = OTHER; note = 2'-fluorouridine-3'-phosphate
  modified_base 11: mod_base = OTHER; note = 2'-fluoroguanosine-3'-phosphate
  modified_base 12: mod_base = OTHER; note = 2'-O-methyladenosine-3'-phosphate
  modified_base 13: mod_base = OTHER; note = 2'-O-methyladenosine-3'-phosphate
  modified_base 14: mod_base = OTHER; note = 2'-O-methylguanosine-3'-phosphate
  modified_base 15: mod_base = OTHER; note = 2'-O-methyladenosine-3'-phosphate
  modified_base 16: mod_base = OTHER; note = 2'-O-methyluridine-3'-phosphate
  modified_base 17: mod_base = OTHER; note = 2'-O-methyladenosine-3'-phosphate
  modified_base 18: mod_base = OTHER; note = 2'-O-methyluridine-3'-phosphate
  modified_base 19: mod_base = OTHER; note = 2'-O-methyluridine-3'-phosphate
  modified_base 20: mod_base = OTHER; note = 2'-O-methyluridine-3'-phosphate
  modified_base 21: mod_base = OTHER; note = 2'-O-methyladenosine-3'-phosphate
tttgtaacttgaagatattta

SEQ ID NO: 217 - RNA, 21 nt, synthetic construct
  source 1..21: mol_type = other RNA
  modified_base 1: mod_base = OTHER; note = 2'-O-methyluridine-3'-phosphorothioate
  modified_base 2: mod_base = OTHER; note = 2'-O-methyladenosine-3'-phosphorothioate
  modified_base 3: mod_base = OTHER; note = 2'-O-methyladenosine-3'-phosphate
  modified_base 4: mod_base = OTHER; note = 2'-O-methylcytidine-3'-phosphate
  modified_base 5: mod_base = OTHER; note = 2'-O-methyluridine-3'-phosphate
  modified_base 6: mod_base = OTHER; note = 2'-O-methyluridine-3'-phosphate
  modified_base 7: mod_base = OTHER; note = 2'-fluoroguanosine-3'-phosphate
  modified_base 8: mod_base = OTHER; note = 2'-O-methyladenosine-3'-phosphate
  modified_base 9: mod_base = OTHER; note = 2'-fluoroadenosine-3'-phosphate
  modified_base 10: mod_base = OTHER; note = 2'-fluoroguanosine-3'-phosphate
  modified_base 11: mod_base = OTHER; note = 2'-fluoroadenosine-3'-phosphate
  modified_base 12: mod_base = OTHER; note = 2'-O-methyluridine-3'-phosphate
  modified_base 13: mod_base = OTHER; note = 2'-O-methyladenosine-3'-phosphate
  modified_base 14: mod_base = OTHER; note = 2'-O-methyluridine-3'-phosphate
  modified_base 15: mod_base = OTHER; note = 2'-O-methyluridine-3'-phosphate
  modified_base 16: mod_base = OTHER; note = 2'-O-methyluridine-3'-phosphate
  modified_base 17: mod_base = OTHER; note = 2'-O-methyladenosine-3'-phosphate
  modified_base 18: mod_base = OTHER; note = 2'-O-methyluridine-3'-phosphate
  modified_base 19: mod_base = OTHER; note = 2'-O-methyluridine-3'-phosphate
  modified_base 20: mod_base = OTHER; note = 2'-O-methylcytidine-3'-phosphate
  modified_base 21: mod_base = OTHER; note = 2'-O-methyluridine-3'-phosphate
taacttgaagatatttattct

SEQ ID NO: 218 - RNA, 21 nt, synthetic construct
  source 1..21: mol_type = other RNA
  modified_base 1: mod_base = OTHER; note = 2'-O-methyladenosine-3'-phosphorothioate
  modified_base 2: mod_base = OTHER; note = 2'-O-methyladenosine-3'-phosphorothioate
  modified_base 3: mod_base = OTHER; note = 2'-O-methylcytidine-3'-phosphate
  modified_base 4: mod_base = OTHER; note = 2'-O-methyluridine-3'-phosphate
  modified_base 5: mod_base = OTHER; note = 2'-O-methyluridine-3'-phosphate
  modified_base 6: mod_base = OTHER; note = 2'-O-methylguanosine-3'-phosphate
  modified_base 7: mod_base = OTHER; note = 2'-fluoroadenosine-3'-phosphate
  modified_base 8: mod_base = OTHER; note = 2'-O-methyladenosine-3'-phosphate
  modified_base 9: mod_base = OTHER; note = 2'-fluoroguanosine-3'-phosphate
  modified_base 10: mod_base = OTHER; note = 2'-fluoroadenosine-3'-phosphate
  modified_base 11: mod_base = OTHER; note = 2'-fluorouridine-3'-phosphate
  modified_base 12: mod_base = OTHER; note = 2'-O-methyladenosine-3'-phosphate
  modified_base 13: mod_base = OTHER; note = 2'-O-methyluridine-3'-phosphate
  modified_base 14: mod_base = OTHER; note = 2'-O-methyluridine-3'-phosphate
  modified_base 15: mod_base = OTHER; note = 2'-O-methyluridine-3'-phosphate
  modified_base 16: mod_base = OTHER; note = 2'-O-methyladenosine-3'-phosphate
  modified_base 17: mod_base = OTHER; note = 2'-O-methyluridine-3'-phosphate
  modified_base 18: mod_base = OTHER; note = 2'-O-methyluridine-3'-phosphate
  modified_base 19: mod_base = OTHER; note = 2'-O-methylcytidine-3'-phosphate
  modified_base 20: mod_base = OTHER; note = 2'-O-methyluridine-3'-phosphate
  modified_base 21: mod_base = OTHER; note = 2'-O-methylguanosine-3'-phosphate
aacttgaagatatttattctg

SEQ ID NO: 219 - RNA, 21 nt, synthetic construct
  source 1..21: mol_type = other RNA
  modified_base 1: mod_base = OTHER; note = 2'-O-methyladenosine-3'-phosphorothioate
  modified_base 2: mod_base = OTHER; note = 2'-O-methyladenosine-3'-phosphorothioate
  modified_base 3: mod_base = OTHER; note = 2'-O-methylguanosine-3'-phosphate
  modified_base 4: mod_base = OTHER; note = 2'-O-methyladenosine-3'-phosphate
  modified_base 5: mod_base = OTHER; note = 2'-O-methyluridine-3'-phosphate
  modified_base 6: mod_base = OTHER; note = 2'-O-methyladenosine-3'-phosphate
  modified_base 7: mod_base = OTHER; note = 2'-fluorouridine-3'-phosphate
  modified_base 8: mod_base = OTHER; note = 2'-O-methyluridine-3'-phosphate
  modified_base 9: mod_base = OTHER; note = 2'-fluorouridine-3'-phosphate
  modified_base 10: mod_base = OTHER; note = 2'-fluoroadenosine-3'-phosphate
  modified_base 11: mod_base = OTHER; note = 2'-fluorouridine-3'-phosphate
  modified_base 12: mod_base = OTHER; note = 2'-O-methyluridine-3'-phosphate
  modified_base 13: mod_base = OTHER; note = 2'-O-methylcytidine-3'-phosphate
  modified_base 14: mod_base = OTHER; note = 2'-O-methyluridine-3'-phosphate
  modified_base 15: mod_base = OTHER; note = 2'-O-methylguanosine-3'-phosphate
  modified_base 16: mod_base = OTHER; note = 2'-O-methylguanosine-3'-phosphate
  modified_base 17: mod_base = OTHER; note = 2'-O-methylguanosine-3'-phosphate
  modified_base 18: mod_base = OTHER; note = 2'-O-methyluridine-3'-phosphate
  modified_base 19: mod_base = OTHER; note = 2'-O-methyluridine-3'-phosphate
  modified_base 20: mod_base = OTHER; note = 2'-O-methyluridine-3'-phosphate
  modified_base 21: mod_base = OTHER; note = 2'-O-methyluridine-3'-phosphate
aagatatttattctgggtttt

SEQ ID NO: 220 - RNA, 21 nt, synthetic construct
  source 1..21: mol_type = other RNA
  modified_base 1: mod_base = OTHER; note = 2'-O-methyladenosine-3'-phosphorothioate
  modified_base 2: mod_base = OTHER; note = 2'-O-methylguanosine-3'-phosphorothioate
  modified_base 3: mod_base = OTHER; note = 2'-O-methyladenosine-3'-phosphate
  modified_base 4: mod_base = OTHER; note = 2'-O-methyluridine-3'-phosphate
  modified_base 5: mod_base = OTHER; note = 2'-O-methyladenosine-3'-phosphate
  modified_base 6: mod_base = OTHER; note = 2'-O-methyluridine-3'-phosphate
  modified_base 7: mod_base = OTHER; note = 2'-fluorouridine-3'-phosphate
  modified_base 8: mod_base = OTHER; note = 2'-O-methyluridine-3'-phosphate
  modified_base 9: mod_base = OTHER; note = 2'-fluoroadenosine-3'-phosphate
  modified_base 10: mod_base = OTHER; note = 2'-fluorouridine-3'-phosphate
  modified_base 11: mod_base = OTHER; note = 2'-fluorouridine-3'-phosphate
  modified_base 12: mod_base = OTHER; note = 2'-O-methylcytidine-3'-phosphate
  modified_base 13: mod_base = OTHER; note = 2'-O-methyluridine-3'-phosphate
  modified_base 14: mod_base = OTHER; note = 2'-O-methylguanosine-3'-phosphate
  modified_base 15: mod_base = OTHER; note = 2'-O-methylguanosine-3'-phosphate
  modified_base 16: mod_base = OTHER; note = 2'-O-methylguanosine-3'-phosphate
  modified_base 17: mod_base = OTHER; note = 2'-O-methyluridine-3'-phosphate
  modified_base 18: mod_base = OTHER; note = 2'-O-methyluridine-3'-phosphate
  modified_base 19: mod_base = OTHER; note = 2'-O-methyluridine-3'-phosphate
  modified_base 20: mod_base = OTHER; note = 2'-O-methyluridine-3'-phosphate
  modified_base 21: mod_base = OTHER; note = 2'-O-methylguanosine-3'-phosphate
agatatttattctgggttttg

SEQ ID NO: 221 - RNA, 21 nt, synthetic construct
  source 1..21: mol_type = other RNA
  modified_base 1: mod_base = OTHER; note = 2'-O-methyladenosine-3'-phosphorothioate
  modified_base 2: mod_base = OTHER; note = 2'-O-methyluridine-3'-phosphorothioate
  modified_base 3: mod_base = OTHER; note = 2'-O-methyladenosine-3'-phosphate
  modified_base 4: mod_base = OTHER; note = 2'-O-methyluridine-3'-phosphate
  modified_base 5: mod_base = OTHER; note = 2'-O-methyluridine-3'-phosphate
  modified_base 6: mod_base = OTHER; note = 2'-O-methyluridine-3'-phosphate
  modified_base 7: mod_base = OTHER; note = 2'-fluoroadenosine-3'-phosphate
  modified_base 8: mod_base = OTHER; note = 2'-O-methyluridine-3'-phosphate
  modified_base 9: mod_base = OTHER; note = 2'-fluorouridine-3'-phosphate
  modified_base 10: mod_base = OTHER; note = 2'-fluorocytidine-3'-phosphate
  modified_base 11: mod_base = OTHER; note = 2'-fluorouridine-3'-phosphate
  modified_base 12: mod_base = OTHER; note = 2'-O-methylguanosine-3'-phosphate
  modified_base 13: mod_base = OTHER; note = 2'-O-methylguanosine-3'-phosphate
  modified_base 14: mod_base = OTHER; note = 2'-O-methylguanosine-3'-phosphate
  modified_base 15: mod_base = OTHER; note = 2'-O-methyluridine-3'-phosphate
  modified_base 16: mod_base = OTHER; note = 2'-O-methyluridine-3'-phosphate
  modified_base 17: mod_base = OTHER; note = 2'-O-methyluridine-3'-phosphate
  modified_base 18: mod_base = OTHER; note = 2'-O-methyluridine-3'-phosphate
  modified_base 19: mod_base = OTHER; note = 2'-O-methylguanosine-3'-phosphate
  modified_base 20: mod_base = OTHER; note = 2'-O-methyluridine-3'-phosphate
  modified_base 21: mod_base = OTHER; note = 2'-O-methyladenosine-3'-phosphate
atatttattctgggttttgta

SEQ ID NO: 222 - RNA, 21 nt, synthetic construct
  source 1..21: mol_type = other RNA
  modified_base 1: mod_base = OTHER; note = 2'-O-methyluridine-3'-phosphorothioate
  modified_base 2: mod_base = OTHER; note = 2'-O-methyladenosine-3'-phosphorothioate
  modified_base 3: mod_base = OTHER; note = 2'-O-methyluridine-3'-phosphate
  modified_base 4: mod_base = OTHER; note = 2'-O-methyluridine-3'-phosphate
  modified_base 5: mod_base = OTHER; note = 2'-O-methyluridine-3'-phosphate
  modified_base 6: mod_base = OTHER; note = 2'-O-methyladenosine-3'-phosphate
  modified_base 7: mod_base = OTHER; note = 2'-fluorouridine-3'-phosphate
  modified_base 8: mod_base = OTHER; note = 2'-O-methyluridine-3'-phosphate
  modified_base 9: mod_base = OTHER; note = 2'-fluorocytidine-3'-phosphate
  modified_base 10: mod_base = OTHER; note = 2'-fluorouridine-3'-phosphate
  modified_base 11: mod_base = OTHER; note = 2'-fluoroguanosine-3'-phosphate
  modified_base 12: mod_base = OTHER; note = 2'-O-methylguanosine-3'-phosphate
  modified_base 13: mod_base = OTHER; note = 2'-O-methylguanosine-3'-phosphate
  modified_base 14: mod_base = OTHER; note = 2'-O-methyluridine-3'-phosphate
  modified_base 15: mod_base = OTHER; note = 2'-O-methyluridine-3'-phosphate
  modified_base 16: mod_base = OTHER; note = 2'-O-methyluridine-3'-phosphate
  modified_base 17: mod_base = OTHER; note = 2'-O-methyluridine-3'-phosphate
  modified_base 18: mod_base = OTHER; note = 2'-O-methylguanosine-3'-phosphate
  modified_base 19: mod_base = OTHER; note = 2'-O-methyluridine-3'-phosphate
  modified_base 20: mod_base = OTHER; note = 2'-O-methyladenosine-3'-phosphate
  modified_base 21: mod_base = OTHER; note = 2'-O-methylguanosine-3'-phosphate
tatttattctgggttttgtag

SEQ ID NO: 223 - RNA, 21 nt, synthetic construct
  source 1..21: mol_type = other RNA
  modified_base 1: mod_base = OTHER; note = 2'-O-methyluridine-3'-phosphorothioate
  modified_base 2: mod_base = OTHER; note = 2'-O-methyluridine-3'-phosphorothioate
  modified_base 3: mod_base = OTHER; note = 2'-O-methylcytidine-3'-phosphate
  modified_base 4: mod_base = OTHER; note = 2'-O-methyluridine-3'-phosphate
  modified_base 5: mod_base = OTHER; note = 2'-O-methylguanosine-3'-phosphate
  modified_base 6: mod_base = OTHER; note = 2'-O-methylguanosine-3'-phosphate
  modified_base 7: mod_base = OTHER; note = 2'-fluoroguanosine-3'-phosphate
  modified_base 8: mod_base = OTHER; note = 2'-O-methyluridine-3'-phosphate
  modified_base 9: mod_base = OTHER; note = 2'-fluorouridine-3'-phosphate
  modified_base 10: mod_base = OTHER; note = 2'-fluorouridine-3'-phosphate
  modified_base 11: mod_base = OTHER; note = 2'-fluorouridine-3'-phosphate
  modified_base 12: mod_base = OTHER; note = 2'-O-methylguanosine-3'-phosphate
  modified_base 13: mod_base = OTHER; note = 2'-O-methyluridine-3'-phosphate
  modified_base 14: mod_base = OTHER; note = 2'-O-methyladenosine-3'-phosphate
  modified_base 15: mod_base = OTHER; note = 2'-O-methylguanosine-3'-phosphate
  modified_base 16: mod_base = OTHER; note = 2'-O-methylcytidine-3'-phosphate
  modified_base 17: mod_base = OTHER; note = 2'-O-methyladenosine-3'-phosphate
  modified_base 18: mod_base = OTHER; note = 2'-O-methyluridine-3'-phosphate
  modified_base 19: mod_base = OTHER; note = 2'-O-methyluridine-3'-phosphate
  modified_base 20: mod_base = OTHER; note = 2'-O-methyluridine-3'-phosphate
  modified_base 21: mod_base = OTHER; note = 2'-O-methyluridine-3'-phosphate
ttctgggttttgtagcatttt

SEQ ID NO: 224 - RNA, 21 nt, synthetic construct
  source 1..21: mol_type = other RNA
  modified_base 1: mod_base = OTHER; note = 2'-O-methylguanosine-3'-phosphorothioate
  modified_base 2: mod_base = OTHER; note = 2'-O-methylguanosine-3'-phosphorothioate
  modified_base 3: mod_base = OTHER; note = 2'-O-methyluridine-3'-phosphate
  modified_base 4: mod_base = OTHER; note = 2'-O-methyluridine-3'-phosphate
  modified_base 5: mod_base = OTHER; note = 2'-O-methyluridine-3'-phosphate
  modified_base 6: mod_base = OTHER; note = 2'-O-methyluridine-3'-phosphate
  modified_base 7: mod_base = OTHER; note = 2'-fluoroguanosine-3'-phosphate
  modified_base 8: mod_base = OTHER; note = 2'-O-methyluridine-3'-phosphate
  modified_base 9: mod_base = OTHER; note = 2'-fluoroadenosine-3'-phosphate
  modified_base 10: mod_base = OTHER; note = 2'-fluoroguanosine-3'-phosphate
  modified_base 11: mod_base = OTHER; note = 2'-fluorocytidine-3'-phosphate
  modified_base 12: mod_base = OTHER; note = 2'-O-methyladenosine-3'-phosphate
  modified_base 13: mod_base = OTHER; note = 2'-O-methyluridine-3'-phosphate
  modified_base 14: mod_base = OTHER; note = 2'-O-methyluridine-3'-phosphate
  modified_base 15: mod_base = OTHER; note = 2'-O-methyluridine-3'-phosphate
  modified_base 16: mod_base = OTHER; note = 2'-O-methyluridine-3'-phosphate
  modified_base 17: mod_base = OTHER; note = 2'-O-methyluridine-3'-phosphate
  modified_base 18: mod_base = OTHER; note = 2'-O-methyladenosine-3'-phosphate
  modified_base 19: mod_base = OTHER; note = 2'-O-methyluridine-3'-phosphate
  modified_base 20: mod_base = OTHER; note = 2'-O-methyluridine-3'-phosphate
  modified_base 21: mod_base = OTHER; note = 2'-O-methyladenosine-3'-phosphate
ggttttgtagcatttttatta

SEQ ID NO: 225 - RNA, 21 nt, synthetic construct
  source 1..21: mol_type = other RNA
  modified_base 1: mod_base = OTHER; note = 2'-O-methylguanosine-3'-phosphorothioate
  modified_base 2: mod_base = OTHER; note = 2'-O-methyluridine-3'-phosphorothioate
  modified_base 3: mod_base = OTHER; note = 2'-O-methyluridine-3'-phosphate
  modified_base 4: mod_base = OTHER; note = 2'-O-methyluridine-3'-phosphate
  modified_base 5: mod_base = OTHER; note = 2'-O-methyluridine-3'-phosphate
  modified_base 6: mod_base = OTHER; note = 2'-O-methylguanosine-3'-phosphate
  modified_base 7: mod_base = OTHER; note = 2'-fluorouridine-3'-phosphate
  modified_base 8: mod_base = OTHER; note = 2'-O-methyladenosine-3'-phosphate
  modified_base 9: mod_base = OTHER; note = 2'-fluoroguanosine-3'-phosphate
  modified_base 10: mod_base = OTHER; note = 2'-fluorocytidine-3'-phosphate
  modified_base 11: mod_base = OTHER; note = 2'-fluoroadenosine-3'-phosphate
  modified_base 12: mod_base = OTHER; note = 2'-O-methyluridine-3'-phosphate
  modified_base 13: mod_base = OTHER; note = 2'-O-methyluridine-3'-phosphate
  modified_base 14: mod_base = OTHER; note = 2'-O-methyluridine-3'-phosphate
  modified_base 15: mod_base = OTHER; note = 2'-O-methyluridine-3'-phosphate
  modified_base 16: mod_base = OTHER; note = 2'-O-methyluridine-3'-phosphate
  modified_base 17: mod_base = OTHER; note = 2'-O-methyladenosine-3'-phosphate
  modified_base 18: mod_base = OTHER; note = 2'-O-methyluridine-3'-phosphate
  modified_base 19: mod_base = OTHER; note = 2'-O-methyluridine-3'-phosphate
  modified_base 20: mod_base = OTHER; note = 2'-O-methyladenosine-3'-phosphate
  modified_base 21: mod_base = OTHER; note = 2'-O-methyladenosine-3'-phosphate
gttttgtagcatttttattaa

SEQ ID NO: 226 - RNA, 21 nt, synthetic construct
  source 1..21: mol_type = other RNA
  modified_base 1: mod_base = OTHER; note = 2'-O-methyluridine-3'-phosphorothioate
  modified_base 2: mod_base = OTHER; note = 2'-O-methyluridine-3'-phosphorothioate
  modified_base 3: mod_base = OTHER; note = 2'-O-methyluridine-3'-phosphate
  modified_base 4: mod_base = OTHER; note = 2'-O-methyluridine-3'-phosphate
  modified_base 5: mod_base = OTHER; note = 2'-O-methylguanosine-3'-phosphate
  modified_base 6: mod_base = OTHER; note = 2'-O-methyluridine-3'-phosphate
  modified_base 7: mod_base = OTHER; note = 2'-fluoroadenosine-3'-phosphate
  modified_base 8: mod_base = OTHER; note = 2'-O-methylguanosine-3'-phosphate
  modified_base 9: mod_base = OTHER; note = 2'-fluorocytidine-3'-phosphate
  modified_base 10: mod_base = OTHER; note = 2'-fluoroadenosine-3'-phosphate
  modified_base 11: mod_base = OTHER; note = 2'-fluorouridine-3'-phosphate
  modified_base 12: mod_base = OTHER; note = 2'-O-methyluridine-3'-phosphate
  modified_base 13: mod_base = OTHER; note = 2'-O-methyluridine-3'-phosphate
  modified_base 14: mod_base = OTHER; note = 2'-O-methyluridine-3'-phosphate
  modified_base 15: mod_base = OTHER; note = 2'-O-methyluridine-3'-phosphate
  modified_base 16: mod_base = OTHER; note = 2'-O-methyladenosine-3'-phosphate
  modified_base 17: mod_base = OTHER; note = 2'-O-methyluridine-3'-phosphate
  modified_base 18: mod_base = OTHER; note = 2'-O-methyluridine-3'-phosphate
  modified_base 19: mod_base = OTHER; note = 2'-O-methyladenosine-3'-phosphate
  modified_base 20: mod_base = OTHER; note = 2'-O-methyladenosine-3'-phosphate
  modified_base 21: mod_base = OTHER; note = 2'-O-methyluridine-3'-phosphate
ttttgtagcatttttattaat

SEQ ID NO: 227 - RNA, 21 nt, synthetic construct
  source 1..21: mol_type = other RNA
  modified_base 1: mod_base = OTHER; note = 2'-O-methyladenosine-3'-phosphorothioate
  modified_base 2: mod_base = OTHER; note = 2'-O-methyluridine-3'-phosphorothioate
  modified_base 3: mod_base = OTHER; note = 2'-O-methyluridine-3'-phosphate
  modified_base 4: mod_base = OTHER; note = 2'-O-methyluridine-3'-phosphate
  modified_base 5: mod_base = OTHER; note = 2'-O-methyluridine-3'-phosphate
  modified_base 6: mod_base = OTHER; note = 2'-O-methyluridine-3'-phosphate
  modified_base 7: mod_base = OTHER; note = 2'-fluoroadenosine-3'-phosphate
  modified_base 8: mod_base = OTHER; note = 2'-O-methyluridine-3'-phosphate
  modified_base 9: mod_base = OTHER; note = 2'-fluorouridine-3'-phosphate
  modified_base 10: mod_base = OTHER; note = 2'-fluoroadenosine-3'-phosphate
  modified_base 11: mod_base = OTHER; note = 2'-fluoroadenosine-3'-phosphate
  modified_base 12: mod_base = OTHER; note = 2'-O-methyluridine-3'-phosphate
  modified_base 13: mod_base = OTHER; note = 2'-O-methyladenosine-3'-phosphate
  modified_base 14: mod_base = OTHER; note = 2'-O-methyluridine-3'-phosphate
  modified_base 15: mod_base = OTHER; note = 2'-O-methylguanosine-3'-phosphate
  modified_base 16: mod_base = OTHER; note = 2'-O-methylguanosine-3'-phosphate
  modified_base 17: mod_base = OTHER; note = 2'-O-methyluridine-3'-phosphate
  modified_base 18: mod_base = OTHER; note = 2'-O-methylguanosine-3'-phosphate
  modified_base 19: mod_base = OTHER; note = 2'-O-methyladenosine-3'-phosphate
  modified_base 20: mod_base = OTHER; note = 2'-O-methylcytidine-3'-phosphate
  modified_base 21: mod_base = OTHER; note = 2'-O-methyluridine-3'-phosphate
atttttattaatatggtgact

SEQ ID NO: 228 - RNA, 21 nt, synthetic construct
  source 1..21: mol_type = other RNA
  modified_base 1: mod_base = OTHER; note = 2'-O-methyluridine-3'-phosphorothioate
  modified_base 2: mod_base = OTHER; note = 2'-O-methyluridine-3'-phosphorothioate
  modified_base 3: mod_base = OTHER; note = 2'-O-methyluridine-3'-phosphate
  modified_base 4: mod_base = OTHER; note = 2'-O-methyluridine-3'-phosphate
  modified_base 5: mod_base = OTHER; note = 2'-O-methyluridine-3'-phosphate
  modified_base 6: mod_base = OTHER; note = 2'-O-methyladenosine-3'-phosphate
  modified_base 7: mod_base = OTHER; note = 2'-fluorouridine-3'-phosphate
  modified_base 8: mod_base = OTHER; note = 2'-O-methyluridine-3'-phosphate
  modified_base 9: mod_base = OTHER; note = 2'-fluoroadenosine-3'-phosphate
  modified_base 10: mod_base = OTHER; note = 2'-fluoroadenosine-3'-phosphate
  modified_base 11: mod_base = OTHER; note = 2'-fluorouridine-3'-phosphate
  modified_base 12: mod_base = OTHER; note = 2'-O-methyladenosine-3'-phosphate
  modified_base 13: mod_base = OTHER; note = 2'-O-methyluridine-3'-phosphate
  modified_base 14: mod_base = OTHER; note = 2'-O-methylguanosine-3'-phosphate
  modified_base 15: mod_base = OTHER; note = 2'-O-methylguanosine-3'-phosphate
  modified_base 16: mod_base = OTHER; note = 2'-O-methyluridine-3'-phosphate
  modified_base 17: mod_base = OTHER; note = 2'-O-methylguanosine-3'-phosphate
  modified_base 18: mod_base = OTHER; note = 2'-O-methyladenosine-3'-phosphate
  modified_base 19: mod_base = OTHER; note = 2'-O-methylcytidine-3'-phosphate
  modified_base 20: mod_base = OTHER; note = 2'-O-methyluridine-3'-phosphate
  modified_base 21: mod_base = OTHER; note = 2'-O-methyluridine-3'-phosphate
tttttattaatatggtgactt

SEQ ID NO: 229 - RNA, 21 nt, synthetic construct
  source 1..21: mol_type = other RNA
  modified_base 1: mod_base = OTHER; note = 2'-O-methyluridine-3'-phosphorothioate
  modified_base 2: mod_base = OTHER; note = 2'-O-methyluridine-3'-phosphorothioate
  modified_base 3: mod_base = OTHER; note = 2'-O-methyluridine-3'-phosphate
  modified_base 4: mod_base = OTHER; note = 2'-O-methyluridine-3'-phosphate
  modified_base 5: mod_base = OTHER; note = 2'-O-methylguanosine-3'-phosphate
  modified_base 6: mod_base = OTHER; note = 2'-O-methylcytidine-3'-phosphate
  modified_base 7: mod_base = OTHER; note = 2'-fluorouridine-3'-phosphate
  modified_base 8: mod_base = OTHER; note = 2'-O-methyluridine-3'-phosphate
  modified_base 9: mod_base = OTHER; note = 2'-fluorouridine-3'-phosphate
  modified_base 10: mod_base = OTHER; note = 2'-fluorouridine-3'-phosphate
  modified_base 11: mod_base = OTHER; note = 2'-fluoroguanosine-3'-phosphate
  modified_base 12: mod_base = OTHER; note = 2'-O-methyluridine-3'-phosphate
  modified_base 13: mod_base = OTHER; note = 2'-O-methyladenosine-3'-phosphate
  modified_base 14: mod_base = OTHER; note = 2'-O-methyladenosine-3'-phosphate
  modified_base 15: mod_base = OTHER; note = 2'-O-methylcytidine-3'-phosphate
  modified_base 16: mod_base = OTHER; note = 2'-O-methyluridine-3'-phosphate
  modified_base 17: mod_base = OTHER; note = 2'-O-methyluridine-3'-phosphate
  modified_base 18: mod_base = OTHER; note = 2'-O-methylguanosine-3'-phosphate
  modified_base 19: mod_base = OTHER; note = 2'-O-methyladenosine-3'-phosphate
  modified_base 20: mod_base = OTHER; note = 2'-O-methyladenosine-3'-phosphate
  modified_base 21: mod_base = OTHER; note = 2'-O-methylguanosine-3'-phosphate
ttttgcttttgtaacttgaag

SEQ ID NO: 230 - RNA, 21 nt, synthetic construct
  source 1..21: mol_type = other RNA
  modified_base 1: mod_base = OTHER; note = 2'-O-methyluridine-3'-phosphorothioate
  modified_base 2: mod_base = OTHER; note = 2'-O-methyluridine-3'-phosphorothioate
  modified_base 3: mod_base = OTHER; note = 2'-O-methylguanosine-3'-phosphate
  modified_base 4: mod_base = OTHER; note = 2'-O-methyluridine-3'-phosphate
  modified_base 5: mod_base = OTHER; note = 2'-O-methyladenosine-3'-phosphate
  modified_base 6: mod_base = OTHER; note = 2'-O-methylguanosine-3'-phosphate
  modified_base 7: mod_base = OTHER; note = 2'-fluorocytidine-3'-phosphate
  modified_base 8: mod_base = OTHER; note = 2'-O-methyladenosine-3'-phosphate
  modified_base 9: mod_base = OTHER; note = 2'-fluorouridine-3'-phosphate
  modified_base 10: mod_base = OTHER; note = 2'-fluorouridine-3'-phosphate
  modified_base 11: mod_base = OTHER; note = 2'-fluorouridine-3'-phosphate
  modified_base 12: mod_base = OTHER; note = 2'-O-methyluridine-3'-phosphate
  modified_base 13: mod_base = OTHER; note = 2'-O-methyluridine-3'-phosphate
  modified_base 14: mod_base = OTHER; note = 2'-O-methyladenosine-3'-phosphate
  modified_base 15: mod_base = OTHER; note = 2'-O-methyluridine-3'-phosphate
  modified_base 16: mod_base = OTHER; note = 2'-O-methyluridine-3'-phosphate
  modified_base 17: mod_base = OTHER; note = 2'-O-methyladenosine-3'-phosphate
  modified_base 18: mod_base = OTHER; note = 2'-O-methyladenosine-3'-phosphate
  modified_base 19: mod_base = OTHER; note = 2'-O-methyluridine-3'-phosphate
  modified_base 20: mod_base = OTHER; note = 2'-O-methyladenosine-3'-phosphate
  modified_base 21: mod_base = OTHER; note = 2'-O-methyluridine-3'-phosphate
ttgtagcatttttattaatat

SEQ ID NO: 231 - RNA, 23 nt, synthetic construct
  source 1..23: mol_type = other RNA
acatgcaggatcttggtgaggta

SEQ ID NO: 232 - RNA, 23 nt, synthetic construct
  source 1..23: mol_type = other RNA
aagacatgcaggatcttggtgag

SEQ ID NO: 233 - RNA, 23 nt, synthetic construct
  source 1..23: mol_type = other RNA
tggaagacatgcaggatcttggt

SEQ ID NO: 234 - RNA, 23 nt, synthetic construct
  source 1..23: mol_type = other RNA
atcttcaccaggaagccaggaag

SEQ ID NO: 235 - RNA, 23 nt, synthetic construct
  source 1..23: mol_type = other RNA
tcatcttcaccaggaagccagga

SEQ ID NO: 236 - RNA, 23 nt, synthetic construct
  source 1..23: mol_type = other RNA
actcatcttcaccaggaagccag

SEQ ID NO: 237 - RNA, 23 nt, synthetic construct
  source 1..23: mol_type = other RNA
cactcatcttcaccaggaagcca

SEQ ID NO: 238 - RNA, 23 nt, synthetic construct
  source 1..23: mol_type = other RNA
gcaacttcaaggccagctccagc

SEQ ID NO: 239 - RNA, 23 nt, synthetic construct
  source 1..23: mol_type = other RNA
tgtagtcgacatggggcaacttc

SEQ ID NO: 240 - RNA, 23 nt, synthetic construct
  source 1..23: mol_type = other RNA
cgatgtagtcgacatggggcaac

SEQ ID NO: 241 - RNA, 23 nt, synthetic construct
  source 1..23: mol_type = other RNA
gtattcatccgcccggtaccgtg

SEQ ID NO: 242 - RNA, 23 nt, synthetic construct
  source 1..23: mol_type = other RNA
ggtattcatccgcccggtaccgt

SEQ ID NO: 243 - RNA, 23 nt, synthetic construct
  source 1..23: mol_type = other RNA
atacacctccaccaggctgcctc

SEQ ID NO: 244 - RNA, 23 nt, synthetic construct
  source 1..23: mol_type = other RNA
agatacacctccaccaggctgcc

SEQ ID NO: 245 - RNA, 23 nt, synthetic construct
  source 1..23: mol_type = other RNA
gagatacacctccaccaggctgc

SEQ ID NO: 246 - RNA, 23 nt, synthetic construct
  source 1..23: mol_type = other RNA
ggagatacacctccaccaggctg

SEQ ID NO: 247 - RNA, 23 nt, synthetic construct
  source 1..23: mol_type = other RNA
atgctggtgtctaggagatacac

SEQ ID NO: 248 - RNA, 23 nt, synthetic construct
  source 1..23: mol_type = other RNA
gtatgctggtgtctaggagatac

SEQ ID NO: 249 - RNA, 23 nt, synthetic construct
  source 1..23: mol_type = other RNA
tctgtatgctggtgtctaggaga

SEQ ID NO: 250 - RNA, 23 nt, synthetic construct
  source 1..23: mol_type = other RNA
actctgtatgctggtgtctagga

SEQ ID NO: 251 - RNA, 23 nt, synthetic construct
  source 1..23: mol_type = other RNA
attctcgaagtcggtgaccatga

SEQ ID NO: 252 - RNA, 23 nt, synthetic construct
  source 1..23: mol_type = other RNA
gcacattctcgaagtcggtgacc

SEQ ID NO: 253 - RNA, 23 nt, synthetic construct
  source 1..23: mol_type = other RNA
ataaactccaggcctatgagggt

SEQ ID NO: 254 - RNA, 23 nt, synthetic construct
  source 1..23: mol_type = other RNA
tttccgaataaactccaggccta

SEQ ID NO: 255 - RNA, 23 nt, synthetic construct
  source 1..23: mol_type = other RNA
ttttccgaataaactccaggcct

SEQ ID NO: 256 - RNA, 23 nt, synthetic construct
  source 1..23: mol_type = other RNA
atgtcccactctgtgacacaaag

SEQ ID NO: 257 - RNA, 23 nt, synthetic construct
  source 1..23: mol_type = other RNA
tttggcagagaagtggatcagtc

SEQ ID NO: 258 - RNA, 23 nt, synthetic construct
  source 1..23: mol_type = other RNA
atctttggcagagaagtggatca

SEQ ID NO: 259 - RNA, 23 nt, synthetic construct
  source 1..23: mol_type = other RNA
tgatgacatctttggcagagaag

SEQ ID NO: 260 - RNA, 23 nt, synthetic construct
  source 1..23: mol_type = other RNA
aaccaggcctcattgatgacatc

SEQ ID NO: 261 - RNA, 23 nt, synthetic construct
  source 1..23: mol_type = other RNA
atacagtcctgcaaaacagctgc

SEQ ID NO: 262 - RNA, 23 nt, synthetic construct
  source 1..23: mol_type = other RNA
ccatacagtcctgcaaaacagct

SEQ ID NO: 263 - RNA, 23 nt, synthetic construct
  source 1..23: mol_type = other RNA
agtgtgctgaccatacagtcctg

SEQ ID NO: 264 - RNA, 23 nt, synthetic construct
  source 1..23: mol_type = other RNA
cgagtgtgctgaccatacagtcc

SEQ ID NO: 265 - RNA, 23 nt, synthetic construct
  source 1..23: mol_type = other RNA
actttgcattccagacctggggc

SEQ ID NO: 266 - RNA, 23 nt, synthetic construct
  source 1..23: mol_type = other RNA
tccttgactttgcattccagacc

SEQ ID NO: 267 - RNA, 23 nt, synthetic construct
  source 1..23: mol_type = other RNA
tgactacacacgtgttgtctacg

SEQ ID NO: 268 - RNA, 23 nt, synthetic construct
  source 1..23: mol_type = other RNA
cattttaaagctcagccccagcc

SEQ ID NO: 269 - RNA, 23 nt, synthetic construct
  source 1..23: mol_type = other RNA
ccattttaaagctcagccccagc

SEQ ID NO: 270 - RNA, 23 nt, synthetic construct
  source 1..23: mol_type = other RNA
accattttaaagctcagccccag

SEQ ID NO: 271 - RNA, 23 nt, synthetic construct
  source 1..23: mol_type = other RNA
aaccattttaaagctcagcccca

SEQ ID NO: 272 - RNA, 23 nt, synthetic construct
  source 1..23: mol_type = other RNA
gaaccattttaaagctcagcccc

SEQ ID NO: 273 - RNA, 23 nt, synthetic construct
  source 1..23: mol_type = other RNA
agtcggaaccattttaaagctca

SEQ ID NO: 274 - RNA, 23 nt, synthetic construct
  source 1..23: mol_type = other RNA
aagtcggaaccattttaaagctc

SEQ ID NO: 275 - RNA, 23 nt, synthetic construct
  source 1..23: mol_type = other RNA
acaagtcggaaccattttaaagc

SEQ ID NO: 276 - RNA, 23 nt, synthetic construct
  source 1..23: mol_type = other RNA
cactcaagggccaggccagcagc

SEQ ID NO: 277 - RNA, 23 nt, synthetic construct
  source 1..23: mol_type = other RNA
ccactcaagggccaggccagcag

SEQ ID NO: 278 - RNA, 23 nt, synthetic construct
  source 1..23: mol_type = other RNA
tgaaatgccccacagtgagggag

SEQ ID NO: 279 - RNA, 23 nt, synthetic construct
  source 1..23: mol_type = other RNA
atggtgaaatgccccacagtgag

SEQ ID NO: 280 - RNA, 23 nt, synthetic construct
  source 1..23: mol_type = other RNA
gaatggtgaaatgccccacagtg

SEQ ID NO: 281 - RNA, 23 nt, synthetic construct
  source 1..23: mol_type = other RNA
tttgaatggtgaaatgccccaca

SEQ ID NO: 282 - RNA, 23 nt, synthetic construct
  source 1..23: mol_type = other RNA
cctgtttgaatggtgaaatgccc

SEQ ID NO: 283 - RNA, 23 nt, synthetic construct
  source 1..23: mol_type = other RNA
acggaacaagagctcaataaaag

SEQ ID NO: 284 - RNA, 23 nt, synthetic construct
  source 1..23: mol_type = other RNA
acagttagctggagatgagggcc

SEQ ID NO: 285 - RNA, 23 nt, synthetic construct
  source 1..23: mol_type = other RNA
aatctgcgtttctggctcagttc

SEQ ID NO: 286 - RNA, 23 nt, synthetic construct
  source 1..23: mol_type = other RNA
ccaatctgcgtttctggctcagt

SEQ ID NO: 287 - RNA, 23 nt, synthetic construct
  source 1..23: mol_type = other RNA
agtaagaagaggcttggcttcag

SEQ ID NO: 288 - RNA, 23 nt, synthetic construct
  source 1..23: mol_type = other RNA
gaagtaagaagaggcttggcttc

SEQ ID NO: 289 - RNA, 23 nt, synthetic construct
  source 1..23: mol_type = other RNA
ataaatgtctgcttgcttgggtg

SEQ ID NO: 290 - RNA, 23 nt, synthetic construct
  source 1..23: mol_type = other RNA
gataaatgtctgcttgcttgggt

SEQ ID NO: 291 - RNA, 23 nt, synthetic construct
  source 1..23: mol_type = other RNA
acagagaggacagacccaaaaga

SEQ ID NO: 292 - RNA, 23 nt, synthetic construct
  source 1..23: mol_type = other RNA
aaaggcaacagagaggacagacc

SEQ ID NO: 293 - RNA, 23 nt, synthetic construct
  source 1..23: mol_type = other RNA
aaaaggcaacagagaggacagac

SEQ ID NO: 294 - RNA, 23 nt, synthetic construct
  source 1..23: mol_type = other RNA
aaaaaggcaacagagaggacaga

SEQ ID NO: 295 - RNA, 23 nt, synthetic construct
  source 1..23: mol_type = other RNA
taaaaaggcaacagagaggacag

SEQ ID NO: 296 - RNA, 23 nt, synthetic construct
  source 1..23: mol_type = other RNA
tgtaaaaaggcaacagagaggac

SEQ ID NO: 297 - RNA, 23 nt, synthetic construct
  source 1..23: mol_type = other RNA
agttggctgtaaaaaggcaacag

SEQ ID NO: 298 - RNA, 23 nt, synthetic construct
  source 1..23: mol_type = other RNA
aaagttggctgtaaaaaggcaac

SEQ ID NO: 299 - RNA, 23 nt, synthetic construct
  source 1..23: mol_type = other RNA
gaaaagttggctgtaaaaaggca

SEQ ID NO: 300 - RNA, 23 nt, synthetic construct
  source 1..23: mol_type = other RNA
ctagaaaagttggctgtaaaaag

SEQ ID NO: 301 - RNA, 23 nt, synthetic construct
  source 1..23: mol_type = other RNA
aacaggtctagaaaagttggctg

SEQ ID NO: 302 - RNA, 23 nt, synthetic construct
  source 1..23: mol_type = other RNA
aaacaggtctagaaaagttggct

SEQ ID NO: 303 - RNA, 23 nt, synthetic construct
  source 1..23: mol_type = other RNA
aaaacaggtctagaaaagttggc

SEQ ID NO: 304 - RNA, 23 nt, synthetic construct
  source 1..23: mol_type = other RNA
gcaaaacaggtctagaaaagttg

SEQ ID NO: 305 - RNA, 23 nt, synthetic construct
  source 1..23: mol_type = other RNA
aagcaaaacaggtctagaaaagt

SEQ ID NO: 306 - RNA, 23 nt, synthetic construct
  source 1..23: mol_type = other RNA
aaagcaaaacaggtctagaaaag

SEQ ID NO: 307 - RNA, 23 nt, synthetic construct
  source 1..23: mol_type = other RNA
caaaagcaaaacaggtctagaaa

SEQ ID NO: 308 - RNA, 23 nt, synthetic construct
  source 1..23: mol_type = other RNA
acaaaagcaaaacaggtctagaa

SEQ ID NO: 309 - RNA, 23 nt, synthetic construct
  source 1..23: mol_type = other RNA
tacaaaagcaaaacaggtctaga

SEQ ID NO: 310 - RNA, 23 nt, synthetic construct
  source 1..23: mol_type = other RNA
ttacaaaagcaaaacaggtctag

SEQ ID NO: 311 - RNA, 23 nt, synthetic construct
  source 1..23: mol_type = other RNA
gttacaaaagcaaaacaggtcta

SEQ ID NO: 312 - RNA, 23 nt, synthetic construct
  source 1..23: mol_type = other RNA
agttacaaaagcaaaacaggtct

SEQ ID NO: 313 - RNA, 23 nt, synthetic construct
  source 1..23: mol_type = other RNA
caagttacaaaagcaaaacaggt

SEQ ID NO: 314 - RNA, 23 nt, synthetic construct
  source 1..23: mol_type = other RNA
ttcaagttacaaaagcaaaacag

SEQ ID NO: 315 - RNA, 23 nt, synthetic construct
  source 1..23: mol_type = other RNA
tcttcaagttacaaaagcaaaac

SEQ ID NO: 316 - RNA, 23 nt, synthetic construct
  source 1..23: mol_type = other RNA
atcttcaagttacaaaagcaaaa

SEQ ID NO: 317 - RNA, 23 nt, synthetic construct
  source 1..23: mol_type = other RNA
aatatcttcaagttacaaaagca

SEQ ID NO: 318 - RNA, 23 nt, synthetic construct
  source 1..23: mol_type = other RNA
aaatatcttcaagttacaaaagc

SEQ ID NO: 319 - RNA, 23 nt, synthetic construct
  source 1..23: mol_type = other RNA
taaatatcttcaagttacaaaag

SEQ ID NO: 320 - RNA, 23 nt, synthetic construct
  source 1..23: mol_type = other RNA
agaataaatatcttcaagttaca

SEQ ID NO: 321 - RNA, 23 nt, synthetic construct
  source 1..23: mol_type = other RNA
cagaataaatatcttcaagttac

SEQ ID NO: 322 - RNA, 23 nt, synthetic construct
  source 1..23: mol_type = other RNA
aaaacccagaataaatatcttca

SEQ ID NO: 323 - RNA, 23 nt, synthetic construct
  source 1..23: mol_type = other RNA
caaaacccagaataaatatcttc

SEQ ID NO: 324 - RNA, 23 nt, synthetic construct
  source 1..23: mol_type = other RNA
tacaaaacccagaataaatatct

SEQ ID NO: 325 - RNA, 23 nt, synthetic construct
  source 1..23: mol_type = other RNA
ctacaaaacccagaataaatatc

SEQ ID NO: 326 - RNA, 23 nt, synthetic construct
  source 1..23: mol_type = other RNA
aaaatgctacaaaacccagaata

SEQ ID NO: 327 - RNA, 23 nt, synthetic construct
  source 1..23: mol_type = other RNA
taataaaaatgctacaaaaccca

SEQ ID NO: 328 - RNA, 23 nt, synthetic construct
  source 1..23: mol_type = other RNA
ttaataaaaatgctacaaaaccc

SEQ ID NO: 329 - RNA, 23 nt, synthetic construct
  source 1..23: mol_type = other RNA
attaataaaaatgctacaaaacc

SEQ ID NO: 330 - RNA, 23 nt, synthetic construct
  source 1..23: mol_type = other RNA
agtcaccatattaataaaaatgc

SEQ ID NO: 331 - RNA, 23 nt, synthetic construct
  source 1..23: mol_type = other RNA
aagtcaccatattaataaaaatg

SEQ ID NO: 332 - RNA, 23 nt, synthetic construct
  source 1..23: mol_type = other RNA
cttcaagttacaaaagcaaaaca

SEQ ID NO: 333 - RNA, 23 nt, synthetic construct
  source 1..23: mol_type = other RNA
atattaataaaaatgctacaaaa

SEQ ID NO: 334 - RNA, 23 nt, synthetic construct
  source 1..23: mol_type = other RNA
  modified_base 1: mod_base = OTHER; note = 2'-O-methyladenosine-3'-phosphorothioate
  modified_base 2: mod_base = OTHER; note = 2'-fluorocytidine-3'-phosphorothioate
  modified_base 3: mod_base = OTHER; note = 2'-O-methyladenosine-3'-phosphate
  modified_base 4: mod_base = OTHER; note = 2'-O-methyluridine-3'-phosphate
  modified_base 5: mod_base = OTHER; note = 2'-O-methylguanosine-3'-phosphate
  modified_base 6: mod_base = OTHER; note = 2'-O-methylcytidine-3'-phosphate
  modified_base 7: mod_base = OTHER; note = 2'-fluoroadenosine-3'-phosphate
  modified_base 8: mod_base = OTHER; note = 2'-O-methylguanosine-3'-phosphate
  modified_base 9: mod_base = OTHER; note = 2'-O-methylguanosine-3'-phosphate
  modified_base 10: mod_base = OTHER; note = 2'-O-methyladenosine-3'-phosphate
  modified_base 11: mod_base = OTHER; note = 2'-O-methyluridine-3'-phosphate
  modified_base 12: mod_base = OTHER; note = 2'-fluorocytidine-3'-phosphate
  modified_base 13: mod_base = OTHER; note = 2'-O-methyluridine-3'-phosphate
  modified_base 14: mod_base = OTHER; note = 2'-fluorouridine-3'-phosphate
  modified_base 15: mod_base = OTHER; note = 2'-O-methylguanosine-3'-phosphate
  modified_base 16: mod_base = OTHER; note = 2'-fluoroguanosine-3'-phosphate
  modified_base 17: mod_base = OTHER; note = 2'-O-methyluridine-3'-phosphate
  modified_base 18: mod_base = OTHER; note = 2'-O-methylguanosine-3'-phosphate
  modified_base 19: mod_base = OTHER; note = 2'-O-methyladenosine-3'-phosphate
  modified_base 20: mod_base = OTHER; note = 2'-O-methylguanosine-3'-phosphate
  modified_base 21: mod_base = OTHER; note = 2'-O-methylguanosine-3'-phosphorothioate
  modified_base 22: mod_base = OTHER; note = 2'-O-methyluridine-3'-phosphorothioate
  modified_base 23: mod_base = OTHER; note = 2'-O-methyladenosine-3'-phosphate
acatgcaggatcttggtgaggta

SEQ ID NO: 335 - RNA, 23 nt, synthetic construct
  source 1..23: mol_type = other RNA
  modified_base 1: mod_base = OTHER; note = 2'-O-methyladenosine-3'-phosphorothioate
  modified_base 2: mod_base = OTHER; note = 2'-fluoroadenosine-3'-phosphorothioate
  modified_base 3: mod_base = OTHER; note = 2'-O-methylguanosine-3'-phosphate
  modified_base 4: mod_base = OTHER; note = 2'-O-methyladenosine-3'-phosphate
  modified_base 5: mod_base = OTHER; note = 2'-O-methylcytidine-3'-phosphate
  modified_base 6: mod_base = OTHER; note = 2'-O-methyladenosine-3'-phosphate
  modified_base 7: mod_base = OTHER; note = 2'-fluorouridine-3'-phosphate
  modified_base 8: mod_base = OTHER; note = 2'-O-methylguanosine-3'-phosphate
  modified_base 9: mod_base = OTHER; note = 2'-O-methylcytidine-3'-phosphate
  modified_base 10: mod_base = OTHER; note = 2'-O-methyladenosine-3'-phosphate
  modified_base 11: mod_base = OTHER; note = 2'-O-methylguanosine-3'-phosphate
  modified_base 12: mod_base = OTHER; note = 2'-fluoroguanosine-3'-phosphate
  modified_base 13: mod_base = OTHER; note = 2'-O-methyladenosine-3'-phosphate
  modified_base 14: mod_base = OTHER; note = 2'-fluorouridine-3'-phosphate
  modified_base 15: mod_base = OTHER; note = 2'-O-methylcytidine-3'-phosphate
  modified_base 16: mod_base = OTHER; note = 2'-fluorouridine-3'-phosphate
  modified_base 17: mod_base = OTHER; note = 2'-O-methyluridine-3'-phosphate
  modified_base 18: mod_base = OTHER; note = 2'-O-methylguanosine-3'-phosphate
  modified_base 19: mod_base = OTHER; note = 2'-O-methylguanosine-3'-phosphate
  modified_base 20: mod_base = OTHER; note = 2'-O-methyluridine-3'-phosphate
  modified_base 21: mod_base = OTHER; note = 2'-O-methylguanosine-3'-phosphorothioate
  modified_base 22: mod_base = OTHER; note = 2'-O-methyladenosine-3'-phosphorothioate
  modified_base 23: mod_base = OTHER; note = 2'-O-methylguanosine-3'-phosphate
aagacatgcaggatcttggtgag

SEQ ID NO: 336 - RNA, 23 nt, synthetic construct
  source 1..23: mol_type = other RNA
  modified_base 1: mod_base = OTHER; note = 2'-O-methyluridine-3'-phosphorothioate
  modified_base 2: mod_base = OTHER; note = 2'-fluoroguanosine-3'-phosphorothioate
  modified_base 3: mod_base = OTHER; note = 2'-O-methylguanosine-3'-phosphate
  modified_base 4: mod_base = OTHER; note = 2'-O-methyladenosine-3'-phosphate
  modified_base 5: mod_base = OTHER; note = 2'-O-methyladenosine-3'-phosphate
  modified_base 6: mod_base = OTHER; note = 2'-O-methylguanosine-3'-phosphate
  modified_base 7: mod_base = OTHER; note = 2'-fluoroadenosine-3'-phosphate
  modified_base 8: mod_base = OTHER; note = 2'-O-methylcytidine-3'-phosphate
  modified_base 9: mod_base = OTHER; note = 2'-O-methyladenosine-3'-phosphate
  modified_base 10: mod_base = OTHER; note = 2'-O-methyluridine-3'-phosphate
  modified_base 11: mod_base = OTHER; note = 2'-O-methylguanosine-3'-phosphate
  modified_base 12: mod_base = OTHER; note = 2'-fluorocytidine-3'-phosphate
  modified_base 13: mod_base = OTHER; note = 2'-O-methyladenosine-3'-phosphate
  modified_base 14: mod_base = OTHER; note = 2'-fluoroguanosine-3'-phosphate
  modified_base 15: mod_base = OTHER; note = 2'-O-methylguanosine-3'-phosphate
  modified_base 16: mod_base = OTHER; note = 2'-fluoroadenosine-3'-phosphate
  modified_base 17: mod_base = OTHER; note = 2'-O-methyluridine-3'-phosphate
  modified_base 18: mod_base = OTHER; note = 2'-O-methylcytidine-3'-phosphate
  modified_base 19: mod_base = OTHER; note = 2'-O-methyluridine-3'-phosphate
  modified_base 20: mod_base = OTHER; note = 2'-O-methyluridine-3'-phosphate
  modified_base 21: mod_base = OTHER; note = 2'-O-methylguanosine-3'-phosphorothioate
  modified_base 22: mod_base = OTHER; note = 2'-O-methylguanosine-3'-phosphorothioate
  modified_base 23: mod_base = OTHER; note = 2'-O-methyluridine-3'-phosphate
tggaagacatgcaggatcttggt

SEQ ID NO: 337 - RNA, 23 nt, synthetic construct
  source 1..23: mol_type = other RNA
  modified_base 1: mod_base = OTHER; note = 2'-O-methyladenosine-3'-phosphorothioate
  modified_base 2: mod_base = OTHER; note = 2'-fluorouridine-3'-phosphorothioate
  modified_base 3: mod_base = OTHER; note = 2'-O-methylcytidine-3'-phosphate
  modified_base 4: mod_base = OTHER; note = 2'-O-methyluridine-3'-phosphate
  modified_base 5: mod_base = OTHER; note = 2'-O-methyluridine-3'-phosphate
  modified_base 6: mod_base = OTHER; note = 2'-O-methylcytidine-3'-phosphate
  modified_base 7: mod_base = OTHER; note = 2'-fluoroadenosine-3'-phosphate
  modified_base 8: mod_base = OTHER; note = 2'-O-methylcytidine-3'-phosphate
  modified_base 9: mod_base = OTHER; note = 2'-O-methylcytidine-3'-phosphate
  modified_base 10: mod_base = OTHER; note = 2'-O-methyladenosine-3'-phosphate
  modified_base 11: mod_base = OTHER; note = 2'-O-methylguanosine-3'-phosphate
  modified_base 12: mod_base = OTHER; note = 2'-fluoroguanosine-3'-phosphate
  modified_base 13: mod_base = OTHER; note = 2'-O-methyladenosine-3'-phosphate
  modified_base 14: mod_base = OTHER; note = 2'-fluoroadenosine-3'-phosphate
  modified_base 15: mod_base = OTHER; note = 2'-O-methylguanosine-3'-phosphate
  modified_base 16: mod_base = OTHER; note = 2'-fluorocytidine-3'-phosphate
  modified_base 17: mod_base = OTHER; note = 2'-O-methylcytidine-3'-phosphate
  modified_base 18: mod_base = OTHER; note = 2'-O-methyladenosine-3'-phosphate
  modified_base 19: mod_base = OTHER; note = 2'-O-methylguanosine-3'-phosphate
  modified_base 20: mod_base = OTHER; note = 2'-O-methylguanosine-3'-phosphate
  modified_base 21: mod_base = OTHER; note = 2'-O-methyladenosine-3'-phosphorothioate
  modified_base 22: mod_base = OTHER; note = 2'-O-methyladenosine-3'-phosphorothioate
  modified_base 23: mod_base = OTHER; note = 2'-O-methylguanosine-3'-phosphate
atcttcaccaggaagccaggaag

SEQ ID NO: 338 - RNA, 23 nt, synthetic construct
  source 1..23: mol_type = other RNA
  modified_base 1: mod_base = OTHER; note = 2'-O-methyluridine-3'-phosphorothioate
  modified_base 2: mod_base = OTHER; note = 2'-fluorocytidine-3'-phosphorothioate
  modified_base 3: mod_base = OTHER; note = 2'-O-methyladenosine-3'-phosphate
  modified_base 4: mod_base = OTHER; note = 2'-O-methyluridine-3'-phosphate
  modified_base 5: mod_base = OTHER; note = 2'-O-methylcytidine-3'-phosphate
  modified_base 6: mod_base = OTHER; note = 2'-O-methyluridine-3'-phosphate
  modified_base 7: mod_base = OTHER; note = 2'-fluorouridine-3'-phosphate
  modified_base 8: mod_base = OTHER; note = 2'-O-methylcytidine-3'-phosphate
  modified_base 9: mod_base = OTHER; note = 2'-O-methyladenosine-3'-phosphate
  modified_base 10: mod_base = OTHER; note = 2'-O-methylcytidine-3'-phosphate
  modified_base 11: mod_base = OTHER; note = 2'-O-methylcytidine-3'-phosphate
  modified_base 12: mod_base = OTHER; note = 2'-fluoroadenosine-3'-phosphate
  modified_base 13: mod_base = OTHER; note = 2'-O-methylguanosine-3'-phosphate
  modified_base 14: mod_base = OTHER; note = 2'-fluoroguanosine-3'-phosphate
  modified_base 15: mod_base = OTHER; note = 2'-O-methyladenosine-3'-phosphate
  modified_base 16: mod_base = OTHER; note = 2'-fluoroadenosine-3'-phosphate
  modified_base 17: mod_base = OTHER; note = 2'-O-methylguanosine-3'-phosphate
  modified_base 18: mod_base = OTHER; note = 2'-O-methylcytidine-3'-phosphate
  modified_base 19: mod_base = OTHER; note = 2'-O-methylcytidine-3'-phosphate
  modified_base 20: mod_base = OTHER; note = 2'-O-methyladenosine-3'-phosphate
  modified_base 21: mod_base = OTHER; note = 2'-O-methylguanosine-3'-phosphorothioate
  modified_base 22: mod_base = OTHER; note = 2'-O-methylguanosine-3'-phosphorothioate
  modified_base 23: mod_base = OTHER; note = 2'-O-methyladenosine-3'-phosphate
tcatcttcaccaggaagccagga

SEQ ID NO: 339 - RNA, 23 nt, synthetic construct
  source 1..23: mol_type = other RNA
  modified_base 1: mod_base = OTHER; note = 2'-O-methyladenosine-3'-phosphorothioate
  modified_base 2: mod_base = OTHER; note = 2'-fluorocytidine-3'-phosphorothioate
  modified_base 3: mod_base = OTHER; note = 2'-O-methyluridine-3'-phosphate
  modified_base 4: mod_base = OTHER; note = 2'-O-methylcytidine-3'-phosphate
  modified_base 5: mod_base = OTHER; note = 2'-O-methyladenosine-3'-phosphate
  modified_base 6: mod_base = OTHER; note = 2'-O-methyluridine-3'-phosphate
  modified_base 7: mod_base = OTHER; note = 2'-fluorocytidine-3'-phosphate
  modified_base 8: mod_base = OTHER; note = 2'-O-methyluridine-3'-phosphate
  modified_base 9: mod_base = OTHER; note = 2'-O-methyluridine-3'-phosphate
  modified_base 10: mod_base = OTHER; note = 2'-O-methylcytidine-3'-phosphate
  modified_base 11: mod_base = OTHER; note = 2'-O-methyladenosine-3'-phosphate
  modified_base 12: mod_base = OTHER; note = 2'-fluorocytidine-3'-phosphate
  modified_base 13: mod_base = OTHER; note = 2'-O-methylcytidine-3'-phosphate
  modified_base 14: mod_base = OTHER; note = 2'-fluoroadenosine-3'-phosphate
  modified_base 15: mod_base = OTHER; note = 2'-O-methylguanosine-3'-phosphate
  modified_base 16: mod_base = OTHER; note = 2'-fluoroguanosine-3'-phosphate
  modified_base 17: mod_base = OTHER; note = 2'-O-methyladenosine-3'-phosphate
  modified_base 18: mod_base = OTHER; note = 2'-O-methyladenosine-3'-phosphate
  modified_base 19: mod_base = OTHER; note = 2'-O-methylguanosine-3'-phosphate
  modified_base 20: mod_base = OTHER; note = 2'-O-methylcytidine-3'-phosphate
  modified_base 21: mod_base = OTHER; note = 2'-O-methylcytidine-3'-phosphorothioate
  modified_base 22: mod_base = OTHER; note = 2'-O-methyladenosine-3'-phosphorothioate
  modified_base 23: mod_base = OTHER; note = 2'-O-methylguanosine-3'-phosphate
actcatcttcaccaggaagccag

SEQ ID NO: 340 - RNA, 23 nt, synthetic construct
  source 1..23: mol_type = other RNA
  modified_base 1: mod_base = OTHER; note = 2'-O-methylcytidine-3'-phosphorothioate
  modified_base 2: mod_base = OTHER; note = 2'-fluoroadenosine-3'-phosphorothioate
  modified_base 3: mod_base = OTHER; note = 2'-O-methylcytidine-3'-phosphate
  modified_base 4: mod_base = OTHER; note = 2'-O-methyluridine-3'-phosphate
  modified_base 5: mod_base = OTHER; note = 2'-O-methylcytidine-3'-phosphate
  modified_base 6: mod_base = OTHER; note = 2'-O-methyladenosine-3'-phosphate
  modified_base 7: mod_base = OTHER; note = 2'-fluorouridine-3'-phosphate
  modified_base 8: mod_base = OTHER; note = 2'-O-methylcytidine-3'-phosphate
  modified_base 9: mod_base = OTHER; note = 2'-O-methyluridine-3'-phosphate
  modified_base 10: mod_base = OTHER; note = 2'-O-methyluridine-3'-phosphate
  modified_base 11: mod_base = OTHER; note = 2'-O-methylcytidine-3'-phosphate
  modified_base 12: mod_base = OTHER; note = 2'-fluoroadenosine-3'-phosphate
  modified_base 13: mod_base = OTHER; note = 2'-O-methylcytidine-3'-phosphate
  modified_base 14: mod_base = OTHER; note = 2'-fluorocytidine-3'-phosphate
  modified_base 15: mod_base = OTHER; note = 2'-O-methyladenosine-3'-phosphate
  modified_base 16: mod_base = OTHER; note = 2'-fluoroguanosine-3'-phosphate
  modified_base 17: mod_base = OTHER; note = 2'-O-methylguanosine-3'-phosphate
  modified_base 18: mod_base = OTHER; note = 2'-O-methyladenosine-3'-phosphate
  modified_base 19: mod_base = OTHER; note = 2'-O-methyladenosine-3'-phosphate
  modified_base 20: mod_base = OTHER; note = 2'-O-methylguanosine-3'-phosphate
  modified_base 21: mod_base = OTHER; note = 2'-O-methylcytidine-3'-phosphorothioate
  modified_base 22: mod_base = OTHER; note = 2'-O-methylcytidine-3'-phosphorothioate
  modified_base 23: mod_base = OTHER; note = 2'-O-methyladenosine-3'-phosphate
cactcatcttcaccaggaagcca

SEQ ID NO: 341 - RNA, 23 nt, synthetic construct
  source 1..23: mol_type = other RNA
  modified_base 1: mod_base = OTHER; note = 2'-O-methylguanosine-3'-phosphorothioate
  modified_base 2: mod_base = OTHER; note = 2'-fluorocytidine-3'-phosphorothioate
  modified_base 3: mod_base = OTHER; note = 2'-O-methyladenosine-3'-phosphate
  modified_base 4: mod_base = OTHER; note = 2'-O-methyladenosine-3'-phosphate
  modified_base 5: mod_base = OTHER; note = 2'-O-methylcytidine-3'-phosphate
  modified_base 6: mod_base = OTHER; note = 2'-O-methyluridine-3'-phosphate
  modified_base 7: mod_base = OTHER; note = 2'-fluorouridine-3'-phosphate
  modified_base 8: mod_base = OTHER; note = 2'-O-methylcytidine-3'-phosphate
  modified_base 9: mod_base = OTHER; note = 2'-O-methyladenosine-3'-phosphate
  modified_base 10: mod_base = OTHER; note = 2'-O-methyladenosine-3'-phosphate
  modified_base 11: mod_base = OTHER; note = 2'-O-methylguanosine-3'-phosphate
  modified_base 12: mod_base = OTHER; note = 2'-fluoroguanosine-3'-phosphate
  modified_base 13: mod_base = OTHER; note = 2'-O-methylcytidine-3'-phosphate
  modified_base 14: mod_base = OTHER; note = 2'-fluorocytidine-3'-phosphate
  modified_base 15: mod_base = OTHER; note = 2'-O-methyladenosine-3'-phosphate
  modified_base 16: mod_base = OTHER; note = 2'-fluoroguanosine-3'-phosphate
  modified_base 17: mod_base = OTHER; note = 2'-O-methylcytidine-3'-phosphate
  modified_base 18: mod_base = OTHER; note = 2'-O-methyluridine-3'-phosphate
  modified_base 19: mod_base = OTHER; note = 2'-O-methylcytidine-3'-phosphate
  modified_base 20: mod_base = OTHER; note = 2'-O-methylcytidine-3'-phosphate
  modified_base 21: mod_base = OTHER; note = 2'-O-methyladenosine-3'-phosphorothioate
  modified_base 22: mod_base = OTHER; note = 2'-O-methylguanosine-3'-phosphorothioate
  modified_base 23: mod_base = OTHER; note = 2'-O-methylcytidine-3'-phosphate
gcaacttcaaggccagctccagc

SEQ ID NO: 342 - RNA, 23 nt, synthetic construct
  source 1..23: mol_type = other RNA
  modified_base 1: mod_base = OTHER; note = 2'-O-methyluridine-3'-phosphorothioate
  modified_base 2: mod_base = OTHER; note = 2'-fluoroguanosine-3'-phosphorothioate
  modified_base 3: mod_base = OTHER; note = 2'-O-methyluridine-3'-phosphate
  modified_base 4: mod_base = OTHER; note = 2'-O-methyladenosine-3'-phosphate
  modified_base 5: mod_base = OTHER; note = 2'-O-methylguanosine-3'-phosphate
  modified_base 6: mod_base = OTHER; note = 2'-O-methyluridine-3'-phosphate
  modified_base 7: mod_base = OTHER; note = 2'-fluorocytidine-3'-phosphate
  modified_base 8: mod_base = OTHER; note = 2'-O-methylguanosine-3'-phosphate
  modified_base 9: mod_base = OTHER; note = 2'-O-methyladenosine-3'-phosphate
  modified_base 10: mod_base = OTHER; note = 2'-O-methylcytidine-3'-phosphate
  modified_base 11: mod_base = OTHER; note = 2'-O-methyladenosine-3'-phosphate
  modified_base 12: mod_base = OTHER; note = 2'-fluorouridine-3'-phosphate
  modified_base 13: mod_base = OTHER; note = 2'-O-methylguanosine-3'-phosphate
  modified_base 14: mod_base = OTHER; note = 2'-fluoroguanosine-3'-phosphate
  modified_base 15: mod_base = OTHER; note = 2'-O-methylguanosine-3'-phosphate
  modified_base 16: mod_base = OTHER; note = 2'-fluoroguanosine-3'-phosphate
  modified_base 17: mod_base = OTHER; note = 2'-O-methylcytidine-3'-phosphate
  modified_base 18: mod_base = OTHER; note = 2'-O-methyladenosine-3'-phosphate
  modified_base 19: mod_base = OTHER; note = 2'-O-methyladenosine-3'-phosphate
  modified_base 20: mod_base = OTHER; note = 2'-O-methylcytidine-3'-phosphate
  modified_base 21: mod_base = OTHER; note = 2'-O-methyluridine-3'-phosphorothioate
  modified_base 22: mod_base = OTHER; note = 2'-O-methyluridine-3'-phosphorothioate
  modified_base 23: mod_base = OTHER; note = 2'-O-methylcytidine-3'-phosphate
tgtagtcgacatggggcaacttc

SEQ ID NO: 343 - RNA, 23 nt, synthetic construct
  source 1..23: mol_type = other RNA
  modified_base 1: mod_base = OTHER; note = 2'-O-methylcytidine-3'-phosphorothioate
  modified_base 2: mod_base = OTHER; note = 2'-fluoroguanosine-3'-phosphorothioate
  modified_base 3: mod_base = OTHER; note = 2'-O-methyladenosine-3'-phosphate
  modified_base 4: mod_base = OTHER; note = 2'-O-methyluridine-3'-phosphate
  modified_base 5: mod_base = OTHER; note = 2'-O-methylguanosine-3'-phosphate
  modified_base 6: mod_base = OTHER; note = 2'-O-methyluridine-3'-phosphate
  modified_base 7: mod_base = OTHER; note = 2'-fluoroadenosine-3'-phosphate
  modified_base 8: mod_base = OTHER; note = 2'-O-methylguanosine-3'-phosphate
  modified_base 9: mod_base = OTHER; note = 2'-O-methyluridine-3'-phosphate
  modified_base 10: mod_base = OTHER; note = 2'-O-methylcytidine-3'-phosphate
  modified_base 11: mod_base = OTHER; note = 2'-O-methylguanosine-3'-phosphate
  modified_base 12: mod_base = OTHER; note = 2'-fluoroadenosine-3'-phosphate
  modified_base 13: mod_base = OTHER; note = 2'-O-methylcytidine-3'-phosphate
  modified_base 14: mod_base = OTHER; note = 2'-fluoroadenosine-3'-phosphate
  modified_base 15: mod_base = OTHER; note = 2'-O-methyluridine-3'-phosphate
  modified_base 16: mod_base = OTHER; note = 2'-fluoroguanosine-3'-phosphate
  modified_base 17: mod_base = OTHER; note = 2'-O-methylguanosine-3'-phosphate
  modified_base 18: mod_base = OTHER; note = 2'-O-methylguanosine-3'-phosphate
  modified_base 19: mod_base = OTHER; note = 2'-O-methylguanosine-3'-phosphate
  modified_base 20: mod_base = OTHER; note = 2'-O-methylcytidine-3'-phosphate
  modified_base 21: mod_base = OTHER; note = 2'-O-methyladenosine-3'-phosphorothioate
  modified_base 22: mod_base = OTHER; note = 2'-O-methyladenosine-3'-phosphorothioate
  modified_base 23: mod_base = OTHER; note = 2'-O-methylcytidine-3'-phosphate
cgatgtagtcgacatggggcaac

SEQ ID NO: 344 - RNA, 23 nt, synthetic construct
  source 1..23: mol_type = other RNA
  modified_base 1: mod_base = OTHER; note = 2'-O-methylguanosine-3'-phosphorothioate
  modified_base 2: mod_base = OTHER; note = 2'-fluorouridine-3'-phosphorothioate
  modified_base 3: mod_base = OTHER; note = 2'-O-methyladenosine-3'-phosphate
  modified_base 4: mod_base = OTHER; note = 2'-O-methyluridine-3'-phosphate
  modified_base 5: mod_base = OTHER; note = 2'-O-methyluridine-3'-phosphate
  modified_base 6: mod_base = OTHER; note = 2'-O-methylcytidine-3'-phosphate
  modified_base 7: mod_base = OTHER; note = 2'-fluoroadenosine-3'-phosphate
  modified_base 8: mod_base = OTHER; note = 2'-O-methyluridine-3'-phosphate
  modified_base 9: mod_base = OTHER; note = 2'-O-methylcytidine-3'-phosphate
  modified_base 10: mod_base = OTHER; note = 2'-O-methylcytidine-3'-phosphate
  modified_base 11: mod_base = OTHER; note = 2'-O-methylguanosine-3'-phosphate
  modified_base 12: mod_base = OTHER; note = 2'-fluorocytidine-3'-phosphate
  modified_base 13: mod_base = OTHER; note = 2'-O-methylcytidine-3'-phosphate
  modified_base 14: mod_base = OTHER; note = 2'-fluorocytidine-3'-phosphate
  modified_base 15: mod_base = OTHER; note = 2'-O-methylguanosine-3'-phosphate
  modified_base 16: mod_base = OTHER; note = 2'-fluoroguanosine-3'-phosphate
  modified_base 17: mod_base = OTHER; note = 2'-O-methyluridine-3'-phosphate
  modified_base 18: mod_base = OTHER; note = 2'-O-methyladenosine-3'-phosphate
  modified_base 19: mod_base = OTHER; note = 2'-O-methylcytidine-3'-phosphate
  modified_base 20: mod_base = OTHER; note = 2'-O-methylcytidine-3'-phosphate
  modified_base 21: mod_base = OTHER; note = 2'-O-methylguanosine-3'-phosphorothioate
  modified_base 22: mod_base = OTHER; note = 2'-O-methyluridine-3'-phosphorothioate
  modified_base 23: mod_base = OTHER; note = 2'-O-methylguanosine-3'-phosphate
gtattcatccgcccggtaccgtg

SEQ ID NO: 345 - RNA, 23 nt, synthetic construct
  source 1..23: mol_type = other RNA
  modified_base 1: mod_base = OTHER; note = 2'-O-methylguanosine-3'-phosphorothioate
  modified_base 2: mod_base = OTHER; note = 2'-fluoroguanosine-3'-phosphorothioate
  modified_base 3: mod_base = OTHER; note = 2'-O-methyluridine-3'-phosphate
  modified_base 4: mod_base = OTHER; note = 2'-O-methyladenosine-3'-phosphate
  modified_base 5: mod_base = OTHER; note = 2'-O-methyluridine-3'-phosphate
  modified_base 6: mod_base = OTHER; note = 2'-O-methyluridine-3'-phosphate
  modified_base 7: mod_base = OTHER; note = 2'-fluorocytidine-3'-phosphate
  modified_base 8: mod_base = OTHER; note = 2'-O-methyladenosine-3'-phosphate
  modified_base 9: mod_base = OTHER; note = 2'-O-methyluridine-3'-phosphate
  modified_base 10: mod_base = OTHER; note = 2'-O-methylcytidine-3'-phosphate
  modified_base 11: mod_base = OTHER; note = 2'-O-methylcytidine-3'-phosphate
  modified_base 12: mod_base = OTHER; note = 2'-fluoroguanosine-3'-phosphate
  modified_base 13: mod_base = OTHER; note = 2'-O-methylcytidine-3'-phosphate
  modified_base 14: mod_base = OTHER; note = 2'-fluorocytidine-3'-phosphate
  modified_base 15: mod_base = OTHER; note = 2'-O-methylcytidine-3'-phosphate
  modified_base 16: mod_base = OTHER; note = 2'-fluoroguanosine-3'-phosphate
  modified_base 17: mod_base = OTHER; note = 2'-O-methylguanosine-3'-phosphate
  modified_base 18: mod_base = OTHER; note = 2'-O-methyluridine-3'-phosphate
  modified_base 19: mod_base = OTHER; note = 2'-O-methyladenosine-3'-phosphate
  modified_base 20: mod_base = OTHER; note = 2'-O-methylcytidine-3'-phosphate
  modified_base 21: mod_base = OTHER; note = 2'-O-methylcytidine-3'-phosphorothioate
  modified_base 22: mod_base = OTHER; note = 2'-O-methylguanosine-3'-phosphorothioate
  modified_base 23: mod_base = OTHER; note = 2'-O-methyluridine-3'-phosphate
ggtattcatccgcccggtaccgt

SEQ ID NO: 346 - RNA, 23 nt, synthetic construct
  source 1..23: mol_type = other RNA
  modified_base 1: mod_base = OTHER; note = 2'-O-methyladenosine-3'-phosphorothioate
  modified_base 2: mod_base = OTHER; note = 2'-fluorouridine-3'-phosphorothioate
  modified_base 3: mod_base = OTHER; note = 2'-O-methyladenosine-3'-phosphate
  modified_base 4: mod_base = OTHER; note = 2'-O-methylcytidine-3'-phosphate
  modified_base 5: mod_base = OTHER; note = 2'-O-methyladenosine-3'-phosphate
  modified_base 6: mod_base = OTHER; note = 2'-O-methylcytidine-3'-phosphate
  modified_base 7: mod_base = OTHER; note = 2'-fluorocytidine-3'-phosphate
  modified_base 8: mod_base = OTHER; note = 2'-O-methyluridine-3'-phosphate
  modified_base 9: mod_base = OTHER; note = 2'-O-methylcytidine-3'-phosphate
  modified_base 10: mod_base = OTHER; note = 2'-O-methylcytidine-3'-phosphate
  modified_base 11: mod_base = OTHER; note = 2'-O-methyladenosine-3'-phosphate
  modified_base 12: mod_base = OTHER; note = 2'-fluorocytidine-3'-phosphate
  modified_base 13: mod_base = OTHER; note = 2'-O-methylcytidine-3'-phosphate
  modified_base 14: mod_base = OTHER; note = 2'-fluoroadenosine-3'-phosphate
  modified_base 15: mod_base = OTHER; note = 2'-O-methylguanosine-3'-phosphate
  modified_base 16: mod_base = OTHER; note = 2'-fluoroguanosine-3'-phosphate
  modified_base 17: mod_base = OTHER; note = 2'-O-methylcytidine-3'-phosphate
  modified_base 18: mod_base = OTHER; note = 2'-O-methyluridine-3'-phosphate
  modified_base 19: mod_base = OTHER; note = 2'-O-methylguanosine-3'-phosphate
  modified_base 20: mod_base = OTHER; note = 2'-O-methylcytidine-3'-phosphate
  modified_base 21: mod_base = OTHER; note = 2'-O-methylcytidine-3'-phosphorothioate
  modified_base 22: mod_base = OTHER; note = 2'-O-methyluridine-3'-phosphorothioate
  modified_base 23: mod_base = OTHER; note = 2'-O-methylcytidine-3'-phosphate
atacacctccaccaggctgcctc

SEQ ID NO: 347 - RNA, 23 nt, synthetic construct
  source 1..23: mol_type = other RNA
  modified_base 1: mod_base = OTHER; note = 2'-O-methyladenosine-3'-phosphorothioate
  modified_base 2: mod_base = OTHER; note = 2'-fluoroguanosine-3'-phosphorothioate
  modified_base 3: mod_base = OTHER; note = 2'-O-methyladenosine-3'-phosphate
  modified_base 4: mod_base = OTHER; note = 2'-O-methyluridine-3'-phosphate
  modified_base 5: mod_base = OTHER; note = 2'-O-methyladenosine-3'-phosphate
  modified_base 6: mod_base = OTHER; note = 2'-O-methylcytidine-3'-phosphate
  modified_base 7: mod_base = OTHER; note = 2'-fluoroadenosine-3'-phosphate
  modified_base 8: mod_base = OTHER; note = 2'-O-methylcytidine-3'-phosphate
  modified_base 9: mod_base = OTHER; note = 2'-O-methylcytidine-3'-phosphate
  modified_base 10: mod_base = OTHER; note = 2'-O-methyluridine-3'-phosphate
  modified_base 11: mod_base = OTHER; note = 2'-O-methylcytidine-3'-phosphate
  modified_base 12: mod_base = OTHER; note = 2'-fluorocytidine-3'-phosphate
  modified_base 13: mod_base = OTHER; note = 2'-O-methyladenosine-3'-phosphate
  modified_base 14: mod_base = OTHER; note = 2'-fluorocytidine-3'-phosphate
  modified_base 15: mod_base = OTHER; note = 2'-O-methylcytidine-3'-phosphate
  modified_base 16: mod_base = OTHER; note = 2'-fluoroadenosine-3'-phosphate
  modified_base 17: mod_base = OTHER; note = 2'-O-methylguanosine-3'-phosphate
  modified_base 18: mod_base = OTHER; note = 2'-O-methylguanosine-3'-phosphate
  modified_base 19: mod_base = OTHER; note = 2'-O-methylcytidine-3'-phosphate
  modified_base 20: mod_base = OTHER; note = 2'-O-methyluridine-3'-phosphate
  modified_base 21: mod_base = OTHER; note = 2'-O-methylguanosine-3'-phosphorothioate
  modified_base 22: mod_base = OTHER; note = 2'-O-methylcytidine-3'-phosphorothioate
  modified_base 23: mod_base = OTHER; note = 2'-O-methylcytidine-3'-phosphate
agatacacctccaccaggctgcc

SEQ ID NO: 348 - RNA, 23 nt, synthetic construct
  source 1..23: mol_type = other RNA
  modified_base 1: mod_base = OTHER; note = 2'-O-methylguanosine-3'-phosphorothioate
  modified_base 2: mod_base = OTHER; note = 2'-fluoroadenosine-3'-phosphorothioate
  modified_base 3: mod_base = OTHER; note = 2'-O-methylguanosine-3'-phosphate
  modified_base 4: mod_base = OTHER; note = 2'-O-methyladenosine-3'-phosphate
  modified_base 5: mod_base = OTHER; note = 2'-O-methyluridine-3'-phosphate
  modified_base 6: mod_base = OTHER; note = 2'-O-methyladenosine-3'-phosphate
  modified_base 7: mod_base = OTHER; note = 2'-fluorocytidine-3'-phosphate
  modified_base 8: mod_base = OTHER; note = 2'-O-methyladenosine-3'-phosphate
  modified_base 9: mod_base = OTHER; note = 2'-O-methylcytidine-3'-phosphate
  modified_base 10: mod_base = OTHER; note = 2'-O-methylcytidine-3'-phosphate
  modified_base 11: mod_base = OTHER; note = 2'-O-methyluridine-3'-phosphate
  modified_base 12: mod_base = OTHER; note = 2'-fluorocytidine-3'-phosphate
  modified_base 13: mod_base = OTHER; note = 2'-O-methylcytidine-3'-phosphate
  modified_base 14: mod_base = OTHER; note = 2'-fluoroadenosine-3'-phosphate
  modified_base 15: mod_base = OTHER; note = 2'-O-methylcytidine-3'-phosphate
  modified_base 16: mod_base = OTHER; note = 2'-fluorocytidine-3'-phosphate
  modified_base 17: mod_base = OTHER; note = 2'-O-methyladenosine-3'-phosphate
  modified_base 18: mod_base = OTHER; note = 2'-O-methylguanosine-3'-phosphate
  modified_base 19: mod_base = OTHER; note = 2'-O-methylguanosine-3'-phosphate
  modified_base 20: mod_base = OTHER; note = 2'-O-methylcytidine-3'-phosphate
  modified_base 21: mod_base = OTHER; note = 2'-O-methyluridine-3'-phosphorothioate
  modified_base 22: mod_base = OTHER; note = 2'-O-methylguanosine-3'-phosphorothioate
  modified_base 23: mod_base = OTHER; note = 2'-O-methylcytidine-3'-phosphate
gagatacacctccaccaggctgc

SEQ ID NO: 349 - RNA, 23 nt, synthetic construct
  source 1..23: mol_type = other RNA
  modified_base 1: mod_base = OTHER; note = 2'-O-methylguanosine-3'-phosphorothioate
  modified_base 2: mod_base = OTHER; note = 2'-fluoroguanosine-3'-phosphorothioate
  modified_base 3: mod_base = OTHER; note = 2'-O-methyladenosine-3'-phosphate
  modified_base 4: mod_base = OTHER; note = 2'-O-methylguanosine-3'-phosphate
  modified_base 5: mod_base = OTHER; note = 2'-O-methyladenosine-3'-phosphate
  modified_base 6: mod_base = OTHER; note = 2'-O-methyluridine-3'-phosphate
  modified_base 7: mod_base = OTHER; note = 2'-fluoroadenosine-3'-phosphate
  modified_base 8: mod_base = OTHER; note = 2'-O-methylcytidine-3'-phosphate
  modified_base 9: mod_base = OTHER; note = 2'-O-methyladenosine-3'-phosphate
  modified_base 10: mod_base = OTHER; note = 2'-O-methylcytidine-3'-phosphate
  modified_base 11: mod_base = OTHER; note = 2'-O-methylcytidine-3'-phosphate
  modified_base 12: mod_base = OTHER; note = 2'-fluorouridine-3'-phosphate
  modified_base 13: mod_base = OTHER; note = 2'-O-methylcytidine-3'-phosphate
  modified_base 14: mod_base = OTHER; note = 2'-fluorocytidine-3'-phosphate
  modified_base 15: mod_base = OTHER; note = 2'-O-methyladenosine-3'-phosphate
  modified_base 16: mod_base = OTHER; note = 2'-fluorocytidine-3'-phosphate
  modified_base 17: mod_base = OTHER; note = 2'-O-methylcytidine-3'-phosphate
  modified_base 18: mod_base = OTHER; note = 2'-O-methyladenosine-3'-phosphate
  modified_base 19: mod_base = OTHER; note = 2'-O-methylguanosine-3'-phosphate
  modified_base 20: mod_base = OTHER; note = 2'-O-methylguanosine-3'-phosphate
  modified_base 21: mod_base = OTHER; note = 2'-O-methylcytidine-3'-phosphorothioate
  modified_base 22: mod_base = OTHER; note = 2'-O-methyluridine-3'-phosphorothioate
  modified_base 23: mod_base = OTHER; note = 2'-O-methylguanosine-3'-phosphate
ggagatacacctccaccaggctg

SEQ ID NO: 350 - RNA, 23 nt, synthetic construct
  source 1..23: mol_type = other RNA
  modified_base 1: mod_base = OTHER; note = 2'-O-methyladenosine-3'-phosphorothioate
  modified_base 2: mod_base = OTHER; note = 2'-fluorouridine-3'-phosphorothioate
  modified_base 3: mod_base = OTHER; note = 2'-O-methylguanosine-3'-phosphate
  modified_base 4: mod_base = OTHER; note = 2'-O-methylcytidine-3'-phosphate
  modified_base 5: mod_base = OTHER; note = 2'-O-methyluridine-3'-phosphate
  modified_base 6: mod_base = OTHER; note = 2'-O-methylguanosine-3'-phosphate
  modified_base 7: mod_base = OTHER; note = 2'-fluoroguanosine-3'-phosphate
  modified_base 8: mod_base = OTHER; note = 2'-O-methyluridine-3'-phosphate
  modified_base 9: mod_base = OTHER; note = 2'-O-methylguanosine-3'-phosphate
  modified_base 10: mod_base = OTHER; note = 2'-O-methyluridine-3'-phosphate
  modified_base 11: mod_base = OTHER; note = 2'-O-methylcytidine-3'-phosphate
  modified_base 12: mod_base = OTHER; note = 2'-fluorouridine-3'-phosphate
  modified_base 13: mod_base = OTHER; note = 2'-O-methyladenosine-3'-phosphate
  modified_base 14: mod_base = OTHER; note = 2'-fluoroguanosine-3'-phosphate
  modified_base 15: mod_base = OTHER; note = 2'-O-methylguanosine-3'-phosphate
  modified_base 16: mod_base = OTHER; note = 2'-fluoroadenosine-3'-phosphate
  modified_base 17: mod_base = OTHER; note = 2'-O-methylguanosine-3'-phosphate
  modified_base 18: mod_base = OTHER; note = 2'-O-methyladenosine-3'-phosphate
  modified_base 19: mod_base = OTHER; note = 2'-O-methyluridine-3'-phosphate
  modified_base 20: mod_base = OTHER; note = 2'-O-methyladenosine-3'-phosphate
  modified_base 21: mod_base = OTHER; note = 2'-O-methylcytidine-3'-phosphorothioate
  modified_base 22: mod_base = OTHER; note = 2'-O-methyladenosine-3'-phosphorothioate
  modified_base 23: mod_base = OTHER; note = 2'-O-methylcytidine-3'-phosphate
atgctggtgtctaggagatacac

SEQ ID NO: 351 - RNA, 23 nt, synthetic construct
  source 1..23: mol_type = other RNA
  modified_base 1: mod_base = OTHER; note = 2'-O-methylguanosine-3'-phosphorothioate
  modified_base 2: mod_base = OTHER; note = 2'-fluorouridine-3'-phosphorothioate
  modified_base 3: mod_base = OTHER; note = 2'-O-methyladenosine-3'-phosphate
  modified_base 4: mod_base = OTHER; note = 2'-O-methyluridine-3'-phosphate
  modified_base 5: mod_base = OTHER; note = 2'-O-methylguanosine-3'-phosphate
  modified_base 6: mod_base = OTHER; note = 2'-O-methylcytidine-3'-phosphate
  modified_base 7: mod_base = OTHER; note = 2'-fluorouridine-3'-phosphate
  modified_base 8: mod_base = OTHER; note = 2'-O-methylguanosine-3'-phosphate
  modified_base 9: mod_base = OTHER; note = 2'-O-methylguanosine-3'-phosphate
  modified_base 10: mod_base = OTHER; note = 2'-O-methyluridine-3'-phosphate
  modified_base 11: mod_base = OTHER; note = 2'-O-methylguanosine-3'-phosphate
  modified_base 12: mod_base = OTHER; note = 2'-fluorouridine-3'-phosphate
  modified_base 13: mod_base = OTHER; note = 2'-O-methylcytidine-3'-phosphate
  modified_base 14: mod_base = OTHER; note = 2'-fluorouridine-3'-phosphate
  modified_base 15: mod_base = OTHER; note = 2'-O-methyladenosine-3'-phosphate
  modified_base 16: mod_base = OTHER; note = 2'-fluoroguanosine-3'-phosphate
  modified_base 17: mod_base = OTHER; note = 2'-O-methylguanosine-3'-phosphate
  modified_base 18: mod_base = OTHER; note = 2'-O-methyladenosine-3'-phosphate
  modified_base 19: mod_base = OTHER; note = 2'-O-methylguanosine-3'-phosphate
  modified_base 20: mod_base = OTHER; note = 2'-O-methyladenosine-3'-phosphate
  modified_base 21: mod_base = OTHER; note = 2'-O-methyluridine-3'-phosphorothioate
  modified_base 22: mod_base = OTHER; note = 2'-O-methyladenosine-3'-phosphorothioate
  modified_base 23: mod_base = OTHER; note = 2'-O-methylcytidine-3'-phosphate
gtatgctggtgtctaggagatac

SEQ ID NO: 352 - RNA, 23 nt, synthetic construct
  source 1..23: mol_type = other RNA
  modified_base 1: mod_base = OTHER; note = 2'-O-methyluridine-3'-phosphorothioate
  modified_base 2: mod_base = OTHER; note = 2'-fluorocytidine-3'-phosphorothioate
  modified_base 3: mod_base = OTHER; note = 2'-O-methyluridine-3'-phosphate
  modified_base 4: mod_base = OTHER; note = 2'-O-methylguanosine-3'-phosphate
  modified_base 5: mod_base = OTHER; note = 2'-O-methyluridine-3'-phosphate
  modified_base 6: mod_base = OTHER; note = 2'-O-methyladenosine-3'-phosphate
  modified_base 7: mod_base = OTHER; note = 2'-fluorouridine-3'-phosphate
  modified_base 8: mod_base = OTHER; note = 2'-O-methylguanosine-3'-phosphate
  modified_base 9: mod_base = OTHER; note = 2'-O-methylcytidine-3'-phosphate
  modified_base 10: mod_base = OTHER; note = 2'-O-methyluridine-3'-phosphate
  modified_base 11: mod_base = OTHER; note = 2'-O-methylguanosine-3'-phosphate
  modified_base 12: mod_base = OTHER; note = 2'-fluoroguanosine-3'-phosphate
  modified_base 13: mod_base = OTHER; note = 2'-O-methyluridine-3'-phosphate
  modified_base 14: mod_base = OTHER; note = 2'-fluoroguanosine-3'-phosphate
  modified_base 15: mod_base = OTHER; note = 2'-O-methyluridine-3'-phosphate
  modified_base 16: mod_base = OTHER; note = 2'-fluorocytidine-3'-phosphate
  modified_base 17: mod_base = OTHER; note = 2'-O-methyluridine-3'-phosphate
  modified_base 18: mod_base = OTHER; note = 2'-O-methyladenosine-3'-phosphate
  modified_base 19: mod_base = OTHER; note = 2'-O-methylguanosine-3'-phosphate
  modified_base 20: mod_base = OTHER; note = 2'-O-methylguanosine-3'-phosphate
  modified_base 21: mod_base = OTHER; note = 2'-O-methyladenosine-3'-phosphorothioate
  modified_base 22: mod_base = OTHER; note = 2'-O-methylguanosine-3'-phosphorothioate
  modified_base 23: mod_base = OTHER; note = 2'-O-methyladenosine-3'-phosphate
tctgtatgctggtgtctaggaga

SEQ ID NO: 353 - RNA, 23 nt, synthetic construct
  source 1..23: mol_type = other RNA
  modified_base 1: mod_base = OTHER; note = 2'-O-methyladenosine-3'-phosphorothioate
  modified_base 2: mod_base = OTHER; note = 2'-fluorocytidine-3'-phosphorothioate
  modified_base 3: mod_base = OTHER; note = 2'-O-methyluridine-3'-phosphate
  modified_base 4: mod_base = OTHER; note = 2'-O-methylcytidine-3'-phosphate
  modified_base 5: mod_base = OTHER; note = 2'-O-methyluridine-3'-phosphate
  modified_base 6: mod_base = OTHER; note = 2'-O-methylguanosine-3'-phosphate
  modified_base 7: mod_base = OTHER; note = 2'-fluorouridine-3'-phosphate
  modified_base 8: mod_base = OTHER; note = 2'-O-methyladenosine-3'-phosphate
  modified_base 9: mod_base = OTHER; note = 2'-O-methyluridine-3'-phosphate
  modified_base 10: mod_base = OTHER; note = 2'-O-methylguanosine-3'-phosphate
  modified_base 11: mod_base = OTHER; note = 2'-O-methylcytidine-3'-phosphate
  modified_base 12: mod_base = OTHER; note = 2'-fluorouridine-3'-phosphate
  modified_base 13: mod_base = OTHER; note = 2'-O-methylguanosine-3'-phosphate
  modified_base 14: mod_base = OTHER; note = 2'-fluoroguanosine-3'-phosphate
  modified_base 15: mod_base = OTHER; note = 2'-O-methyluridine-3'-phosphate
  modified_base 16: mod_base = OTHER; note = 2'-fluoroguanosine-3'-phosphate
  modified_base 17: mod_base = OTHER; note = 2'-O-methyluridine-3'-phosphate
  modified_base 18: mod_base = OTHER; note = 2'-O-methylcytidine-3'-phosphate
  modified_base 19: mod_base = OTHER; note = 2'-O-methyluridine-3'-phosphate
  modified_base 20: mod_base = OTHER; note = 2'-O-methyladenosine-3'-phosphate
  modified_base 21: mod_base = OTHER; note = 2'-O-methylguanosine-3'-phosphorothioate
  modified_base 22: mod_base = OTHER; note = 2'-O-methylguanosine-3'-phosphorothioate
  modified_base 23: mod_base = OTHER; note = 2'-O-methyladenosine-3'-phosphate
actctgtatgctggtgtctagga

SEQ ID NO: 354 - RNA, 23 nt, synthetic construct
  source 1..23: mol_type = other RNA
  modified_base 1: mod_base = OTHER; note = 2'-O-methyladenosine-3'-phosphorothioate
  modified_base 2: mod_base = OTHER; note = 2'-fluorouridine-3'-phosphorothioate
  modified_base 3: mod_base = OTHER; note = 2'-O-methyluridine-3'-phosphate
  modified_base 4: mod_base = OTHER; note = 2'-O-methylcytidine-3'-phosphate
  modified_base 5: mod_base = OTHER; note = 2'-O-methyluridine-3'-phosphate
  modified_base 6: mod_base = OTHER; note = 2'-O-methylcytidine-3'-phosphate
  modified_base 7: mod_base = OTHER; note = 2'-fluoroguanosine-3'-phosphate
  modified_base 8: mod_base = OTHER; note = 2'-O-methyladenosine-3'-phosphate
  modified_base 9: mod_base = OTHER; note = 2'-O-methyladenosine-3'-phosphate
  modified_base 10: mod_base = OTHER; note = 2'-O-methylguanosine-3'-phosphate
  modified_base 11: mod_base = OTHER; note = 2'-O-methyluridine-3'-phosphate
  modified_base 12: mod_base = OTHER; note = 2'-fluorocytidine-3'-phosphate
  modified_base 13: mod_base = OTHER; note = 2'-O-methylguanosine-3'-phosphate
  modified_base 14: mod_base = OTHER; note = 2'-fluoroguanosine-3'-phosphate
  modified_base 15: mod_base = OTHER; note = 2'-O-methyluridine-3'-phosphate
  modified_base 16: mod_base = OTHER; note = 2'-fluoroguanosine-3'-phosphate
  modified_base 17: mod_base = OTHER; note = 2'-O-methyladenosine-3'-phosphate
  modified_base 18: mod_base = OTHER; note = 2'-O-methylcytidine-3'-phosphate
  modified_base 19: mod_base = OTHER; note = 2'-O-methylcytidine-3'-phosphate
  modified_base 20: mod_base = OTHER; note = 2'-O-methyladenosine-3'-phosphate
  modified_base 21: mod_base = OTHER; note = 2'-O-methyluridine-3'-phosphorothioate
  modified_base 22: mod_base = OTHER; note = 2'-O-methylguanosine-3'-phosphorothioate
  modified_base 23: mod_base = OTHER; note = 2'-O-methyladenosine-3'-phosphate
attctcgaagtcggtgaccatga

SEQ ID NO: 355 - RNA, 23 nt, synthetic construct
  source 1..23: mol_type = other RNA
  modified_base 1: mod_base = OTHER; note = 2'-O-methylguanosine-3'-phosphorothioate
  modified_base 2: mod_base = OTHER; note = 2'-fluorocytidine-3'-phosphorothioate
  modified_base 3: mod_base = OTHER; note = 2'-O-methyladenosine-3'-phosphate
  modified_base 4: mod_base = OTHER; note = 2'-O-methylcytidine-3'-phosphate
  modified_base 5: mod_base = OTHER; note = 2'-O-methyladenosine-3'-phosphate
  modified_base 6: mod_base = OTHER; note = 2'-O-methyluridine-3'-phosphate
  modified_base 7: mod_base = OTHER; note = 2'-fluorouridine-3'-phosphate
  modified_base 8: mod_base = OTHER; note = 2'-O-methylcytidine-3'-phosphate
  modified_base 9: mod_base = OTHER; note = 2'-O-methyluridine-3'-phosphate
  modified_base 10: mod_base = OTHER; note = 2'-O-methylcytidine-3'-phosphate
  modified_base 11: mod_base = OTHER; note = 2'-O-methylguanosine-3'-phosphate
  modified_base 12: mod_base = OTHER; note = 2'-fluoroadenosine-3'-phosphate
  modified_base 13: mod_base = OTHER; note = 2'-O-methyladenosine-3'-phosphate
  modified_base 14: mod_base = OTHER; note = 2'-fluoroguanosine-3'-phosphate
  modified_base 15: mod_base = OTHER; note = 2'-O-methyluridine-3'-phosphate
  modified_base 16: mod_base = OTHER; note = 2'-fluorocytidine-3'-phosphate
  modified_base 17: mod_base = OTHER; note = 2'-O-methylguanosine-3'-phosphate
  modified_base 18: mod_base = OTHER; note = 2'-O-methylguanosine-3'-phosphate
  modified_base 19: mod_base = OTHER; note = 2'-O-methyluridine-3'-phosphate
  modified_base 20: mod_base = OTHER; note = 2'-O-methylguanosine-3'-phosphate
  modified_base 21: mod_base = OTHER; note = 2'-O-methyladenosine-3'-phosphorothioate
  modified_base 22: mod_base = OTHER; note = 2'-O-methylcytidine-3'-phosphorothioate
  modified_base 23: mod_base = OTHER; note = 2'-O-methylcytidine-3'-phosphate
gcacattctcgaagtcggtgacc

SEQ ID NO: 356 - RNA, 23 nt, synthetic construct
  source 1..23: mol_type = other RNA
  modified_base 1: mod_base = OTHER; note = 2'-O-methyladenosine-3'-phosphorothioate
  modified_base 2: mod_base = OTHER; note = 2'-fluorouridine-3'-phosphorothioate
  modified_base 3: mod_base = OTHER; note = 2'-O-methyladenosine-3'-phosphate
  modified_base 4: mod_base = OTHER; note = 2'-O-methyladenosine-3'-phosphate
  modified_base 5: mod_base = OTHER; note = 2'-O-methyladenosine-3'-phosphate
  modified_base 6: mod_base = OTHER; note = 2'-O-methylcytidine-3'-phosphate
  modified_base 7: mod_base = OTHER; note = 2'-fluorouridine-3'-phosphate
  modified_base 8: mod_base = OTHER; note = 2'-O-methylcytidine-3'-phosphate
  modified_base 9: mod_base = OTHER; note = 2'-O-methylcytidine-3'-phosphate
  modified_base 10: mod_base = OTHER; note = 2'-O-methyladenosine-3'-phosphate
  modified_base 11: mod_base = OTHER; note = 2'-O-methylguanosine-3'-phosphate
  modified_base 12: mod_base = OTHER; note = 2'-fluoroguanosine-3'-phosphate
  modified_base 13: mod_base = OTHER; note = 2'-O-methylcytidine-3'-phosphate
  modified_base 14: mod_base = OTHER; note = 2'-fluorocytidine-3'-phosphate
  modified_base 15: mod_base = OTHER; note = 2'-O-methyluridine-3'-phosphate
  modified_base 16: mod_base = OTHER; note = 2'-fluoroadenosine-3'-phosphate
  modified_base 17: mod_base = OTHER; note = 2'-O-methyluridine-3'-phosphate
  modified_base 18: mod_base = OTHER; note = 2'-O-methylguanosine-3'-phosphate
  modified_base 19: mod_base = OTHER; note = 2'-O-methyladenosine-3'-phosphate
  modified_base 20: mod_base = OTHER; note = 2'-O-methylguanosine-3'-phosphate
  modified_base 21: mod_base = OTHER; note = 2'-O-methylguanosine-3'-phosphorothioate
  modified_base 22: mod_base = OTHER; note = 2'-O-methylguanosine-3'-phosphorothioate
  modified_base 23: mod_base = OTHER; note = 2'-O-methyluridine-3'-phosphate
ataaactccaggcctatgagggt

SEQ ID NO: 357 - RNA, 23 nt, synthetic construct
  source 1..23: mol_type = other RNA
  modified_base 1: mod_base = OTHER; note = 2'-O-methyluridine-3'-phosphorothioate
  modified_base 2: mod_base = OTHER; note = 2'-fluorouridine-3'-phosphorothioate
  modified_base 3: mod_base = OTHER; note = 2'-O-methyluridine-3'-phosphate
  modified_base 4: mod_base = OTHER; note = 2'-O-methylcytidine-3'-phosphate
  modified_base 5: mod_base = OTHER; note = 2'-O-methylcytidine-3'-phosphate
  modified_base 6: mod_base = OTHER; note = 2'-O-methylguanosine-3'-phosphate
  modified_base 7: mod_base = OTHER; note = 2'-fluoroadenosine-3'-phosphate
  modified_base 8: mod_base = OTHER; note = 2'-O-methyladenosine-3'-phosphate
  modified_base 9: mod_base = OTHER; note = 2'-O-methyluridine-3'-phosphate
  modified_base 10: mod_base = OTHER; note = 2'-O-methyladenosine-3'-phosphate
  modified_base 11: mod_base = OTHER; note = 2'-O-methyladenosine-3'-phosphate
  modified_base 12: mod_base = OTHER; note = 2'-fluoroadenosine-3'-phosphate
  modified_base 13: mod_base = OTHER; note = 2'-O-methylcytidine-3'-phosphate
  modified_base 14: mod_base = OTHER; note = 2'-fluorouridine-3'-phosphate
  modified_base 15: mod_base = OTHER; note = 2'-O-methylcytidine-3'-phosphate
  modified_base 16: mod_base = OTHER; note = 2'-fluorocytidine-3'-phosphate
  modified_base 17: mod_base = OTHER; note = 2'-O-methyladenosine-3'-phosphate
  modified_base 18: mod_base = OTHER; note = 2'-O-methylguanosine-3'-phosphate
  modified_base 19: mod_base = OTHER; note = 2'-O-methylguanosine-3'-phosphate
  modified_base 20: mod_base = OTHER; note = 2'-O-methylcytidine-3'-phosphate
  modified_base 21: mod_base = OTHER; note = 2'-O-methylcytidine-3'-phosphorothioate
  modified_base 22: mod_base = OTHER; note = 2'-O-methyluridine-3'-phosphorothioate
  modified_base 23: mod_base = OTHER; note = 2'-O-methyladenosine-3'-phosphate
tttccgaataaactccaggccta

SEQ ID NO: 358 - RNA, 23 nt, synthetic construct
  source 1..23: mol_type = other RNA
  modified_base 1: mod_base = OTHER; note = 2'-O-methyluridine-3'-phosphorothioate
  modified_base 2: mod_base = OTHER; note = 2'-fluorouridine-3'-phosphorothioate
  modified_base 3: mod_base = OTHER; note = 2'-O-methyluridine-3'-phosphate
  modified_base 4: mod_base = OTHER; note = 2'-O-methyluridine-3'-phosphate
  modified_base 5: mod_base = OTHER; note = 2'-O-methylcytidine-3'-phosphate
  modified_base 6: mod_base = OTHER; note = 2'-O-methylcytidine-3'-phosphate
  modified_base 7: mod_base = OTHER; note = 2'-fluoroguanosine-3'-phosphate
  modified_base 8: mod_base = OTHER; note = 2'-O-methyladenosine-3'-phosphate
  modified_base 9: mod_base = OTHER; note = 2'-O-methyladenosine-3'-phosphate
  modified_base 10: mod_base = OTHER; note = 2'-O-methyluridine-3'-phosphate
  modified_base 11: mod_base = OTHER; note = 2'-O-methyladenosine-3'-phosphate
  modified_base 12: mod_base = OTHER; note = 2'-fluoroadenosine-3'-phosphate
  modified_base 13: mod_base = OTHER; note = 2'-O-methyladenosine-3'-phosphate
  modified_base 14: mod_base = OTHER; note = 2'-fluorocytidine-3'-phosphate
  modified_base 15: mod_base = OTHER; note = 2'-O-methyluridine-3'-phosphate
  modified_base 16: mod_base = OTHER; note = 2'-fluorocytidine-3'-phosphate
  modified_base 17: mod_base = OTHER; note = 2'-O-methylcytidine-3'-phosphate
  modified_base 18: mod_base = OTHER; note = 2'-O-methyladenosine-3'-phosphate
  modified_base 19: mod_base = OTHER; note = 2'-O-methylguanosine-3'-phosphate
  modified_base 20: mod_base = OTHER; note = 2'-O-methylguanosine-3'-phosphate
  modified_base 21: mod_base = OTHER; note = 2'-O-methylcytidine-3'-phosphorothioate
  modified_base 22: mod_base = OTHER; note = 2'-O-methylcytidine-3'-phosphorothioate
  modified_base 23: mod_base = OTHER; note = 2'-O-methyluridine-3'-phosphate
ttttccgaataaactccaggcct

SEQ ID NO: 359 - RNA, 23 nt, synthetic construct
  source 1..23: mol_type = other RNA
  modified_base 1: mod_base = OTHER; note = 2'-O-methyladenosine-3'-phosphorothioate
  modified_base 2: mod_base = OTHER; note = 2'-fluorouridine-3'-phosphorothioate
  modified_base 3: mod_base = OTHER; note = 2'-O-methylguanosine-3'-phosphate
  modified_base 4: mod_base = OTHER; note = 2'-O-methyluridine-3'-phosphate
  modified_base 5: mod_base = OTHER; note = 2'-O-methylcytidine-3'-phosphate
  modified_base 6: mod_base = OTHER; note = 2'-O-methylcytidine-3'-phosphate
  modified_base 7: mod_base = OTHER; note = 2'-fluorocytidine-3'-phosphate
  modified_base 8: mod_base = OTHER; note = 2'-O-methyladenosine-3'-phosphate
  modified_base 9: mod_base = OTHER; note = 2'-O-methylcytidine-3'-phosphate
  modified_base 10: mod_base = OTHER; note = 2'-O-methyluridine-3'-phosphate
  modified_base 11: mod_base = OTHER; note = 2'-O-methylcytidine-3'-phosphate
  modified_base 12: mod_base = OTHER; note = 2'-fluorouridine-3'-phosphate
  modified_base 13: mod_base = OTHER; note = 2'-O-methylguanosine-3'-phosphate
  modified_base 14: mod_base = OTHER; note = 2'-fluorouridine-3'-phosphate
  modified_base 15: mod_base = OTHER; note = 2'-O-methylguanosine-3'-phosphate
  modified_base 16: mod_base = OTHER; note = 2'-fluoroadenosine-3'-phosphate
  modified_base 17: mod_base = OTHER; note = 2'-O-methylcytidine-3'-phosphate
  modified_base 18: mod_base = OTHER; note = 2'-O-methyladenosine-3'-phosphate
  modified_base 19: mod_base = OTHER; note = 2'-O-methylcytidine-3'-phosphate
  modified_base 20: mod_base = OTHER; note = 2'-O-methyladenosine-3'-phosphate
  modified_base 21: mod_base = OTHER; note = 2'-O-methyladenosine-3'-phosphorothioate
  modified_base 22: mod_base = OTHER; note = 2'-O-methyladenosine-3'-phosphorothioate
  modified_base 23: mod_base = OTHER; note = 2'-O-methylguanosine-3'-phosphate
atgtcccactctgtgacacaaag

SEQ ID NO: 360 - RNA, 23 nt, synthetic construct
  source 1..23: mol_type = other RNA
  modified_base 1: mod_base = OTHER; note = 2'-O-methyluridine-3'-phosphorothioate
  modified_base 2: mod_base = OTHER; note = 2'-fluorouridine-3'-phosphorothioate
  modified_base 3: mod_base = OTHER; note = 2'-O-methyluridine-3'-phosphate
  modified_base 4: mod_base = OTHER; note = 2'-O-methylguanosine-3'-phosphate
  modified_base 5: mod_base = OTHER; note = 2'-O-methylguanosine-3'-phosphate
  modified_base 6: mod_base = OTHER; note = 2'-O-methylcytidine-3'-phosphate
  modified_base 7: mod_base = OTHER; note = 2'-fluoroadenosine-3'-phosphate
  modified_base 8: mod_base = OTHER; note = 2'-O-methylguanosine-3'-phosphate
  modified_base 9: mod_base = OTHER; note = 2'-O-methyladenosine-3'-phosphate
  modified_base 10: mod_base = OTHER; note = 2'-O-methylguanosine-3'-phosphate
  modified_base 11: mod_base = OTHER; note = 2'-O-methyladenosine-3'-phosphate
  modified_base 12: mod_base = OTHER; note = 2'-fluoroadenosine-3'-phosphate
  modified_base 13: mod_base = OTHER; note = 2'-O-methylguanosine-3'-phosphate
  modified_base 14: mod_base = OTHER; note = 2'-fluorouridine-3'-phosphate
  modified_base 15: mod_base = OTHER; note = 2'-O-methylguanosine-3'-phosphate
  modified_base 16: mod_base = OTHER; note = 2'-fluoroguanosine-3'-phosphate
  modified_base 17: mod_base = OTHER; note = 2'-O-methyladenosine-3'-phosphate
  modified_base 18: mod_base = OTHER; note = 2'-O-methyluridine-3'-phosphate
  modified_base 19: mod_base = OTHER; note = 2'-O-methylcytidine-3'-phosphate
  modified_base 20: mod_base = OTHER; note = 2'-O-methyladenosine-3'-phosphate
  modified_base 21: mod_base = OTHER; note = 2'-O-methylguanosine-3'-phosphorothioate
  modified_base 22: mod_base = OTHER; note = 2'-O-methyluridine-3'-phosphorothioate
  modified_base 23: mod_base = OTHER; note = 2'-O-methylcytidine-3'-phosphate
tttggcagagaagtggatcagtc

SEQ ID NO: 361 - RNA, 23 nt, synthetic construct
  source 1..23: mol_type = other RNA
  modified_base 1: mod_base = OTHER; note = 2'-O-methyladenosine-3'-phosphorothioate
  modified_base 2: mod_base = OTHER; note = 2'-fluorouridine-3'-phosphorothioate
  modified_base 3: mod_base = OTHER; note = 2'-O-methylcytidine-3'-phosphate
  modified_base 4: mod_base = OTHER; note = 2'-O-methyluridine-3'-phosphate
  modified_base 5: mod_base = OTHER; note = 2'-O-methyluridine-3'-phosphate
  modified_base 6: mod_base = OTHER; note = 2'-O-methyluridine-3'-phosphate
  modified_base 7: mod_base = OTHER; note = 2'-fluoroguanosine-3'-phosphate
  modified_base 8: mod_base = OTHER; note = 2'-O-methylguanosine-3'-phosphate
  modified_base 9: mod_base = OTHER; note = 2'-O-methylcytidine-3'-phosphate
  modified_base 10: mod_base = OTHER; note = 2'-O-methyladenosine-3'-phosphate
  modified_base 11: mod_base = OTHER; note = 2'-O-methylguanosine-3'-phosphate
  modified_base 12: mod_base = OTHER; note = 2'-fluoroadenosine-3'-phosphate
  modified_base 13: mod_base = OTHER; note = 2'-O-methylguanosine-3'-phosphate
  modified_base 14: mod_base = OTHER; note = 2'-fluoroadenosine-3'-phosphate
  modified_base 15: mod_base = OTHER; note = 2'-O-methyladenosine-3'-phosphate
  modified_base 16: mod_base = OTHER; note = 2'-fluoroguanosine-3'-phosphate
  modified_base 17: mod_base = OTHER; note = 2'-O-methyluridine-3'-phosphate
  modified_base 18: mod_base = OTHER; note = 2'-O-methylguanosine-3'-phosphate
  modified_base 19: mod_base = OTHER; note = 2'-O-methylguanosine-3'-phosphate
  modified_base 20: mod_base = OTHER; note = 2'-O-methyladenosine-3'-phosphate
  modified_base 21: mod_base = OTHER; note = 2'-O-methyluridine-3'-phosphorothioate
  modified_base 22: mod_base = OTHER; note = 2'-O-methylcytidine-3'-phosphorothioate
  modified_base 23: mod_base = OTHER; note = 2'-O-methyladenosine-3'-phosphate
atctttggcagagaagtggatca

SEQ ID NO: 362 - RNA, 23 nt, synthetic construct
  source 1..23: mol_type = other RNA
  modified_base 1: mod_base = OTHER; note = 2'-O-methyluridine-3'-phosphorothioate
  modified_base 2: mod_base = OTHER; note = 2'-fluoroguanosine-3'-phosphorothioate
  modified_base 3: mod_base = OTHER; note = 2'-O-methyladenosine-3'-phosphate
  modified_base 4: mod_base = OTHER; note = 2'-O-methyluridine-3'-phosphate
  modified_base 5: mod_base = OTHER; note = 2'-O-methylguanosine-3'-phosphate
  modified_base 6: mod_base = OTHER; note = 2'-O-methyladenosine-3'-phosphate
  modified_base 7: mod_base = OTHER; note = 2'-fluorocytidine-3'-phosphate
  modified_base 8: mod_base = OTHER; note = 2'-O-methyladenosine-3'-phosphate
  modified_base 9: mod_base = OTHER; note = 2'-O-methyluridine-3'-phosphate
  modified_base 10: mod_base = OTHER; note = 2'-O-methylcytidine-3'-phosphate
  modified_base 11: mod_base = OTHER; note = 2'-O-methyluridine-3'-phosphate
  modified_base 12: mod_base = OTHER; note = 2'-fluorouridine-3'-phosphate
  modified_base 13: mod_base = OTHER; note = 2'-O-methyluridine-3'-phosphate
  modified_base 14: mod_base = OTHER; note = 2'-fluoroguanosine-3'-phosphate
  modified_base 15: mod_base = OTHER; note = 2'-O-methylguanosine-3'-phosphate
  modified_base 16: mod_base = OTHER; note = 2'-fluorocytidine-3'-phosphate
  modified_base 17: mod_base = OTHER; note = 2'-O-methyladenosine-3'-phosphate
  modified_base 18: mod_base = OTHER; note = 2'-O-methylguanosine-3'-phosphate
  modified_base 19: mod_base = OTHER; note = 2'-O-methyladenosine-3'-phosphate
  modified_base 20: mod_base = OTHER; note = 2'-O-methylguanosine-3'-phosphate
  modified_base 21: mod_base = OTHER; note = 2'-O-methyladenosine-3'-phosphorothioate
  modified_base 22: mod_base = OTHER; note = 2'-O-methyladenosine-3'-phosphorothioate
  modified_base 23: mod_base = OTHER; note = 2'-O-methylguanosine-3'-phosphate
tgatgacatctttggcagagaag

SEQ ID NO: 363 - RNA, 23 nt, synthetic construct
  source 1..23: mol_type = other RNA
  modified_base 1: mod_base = OTHER; note = 2'-O-methyladenosine-3'-phosphorothioate
  modified_base 2: mod_base = OTHER; note = 2'-fluoroadenosine-3'-phosphorothioate
  modified_base 3: mod_base = OTHER; note = 2'-O-methylcytidine-3'-phosphate
  modified_base 4: mod_base = OTHER; note = 2'-O-methylcytidine-3'-phosphate
  modified_base 5: mod_base = OTHER; note = 2'-O-methyladenosine-3'-phosphate
  modified_base 6: mod_base = OTHER; note = 2'-O-methylguanosine-3'-phosphate
  modified_base 7: mod_base = OTHER; note = 2'-fluoroguanosine-3'-phosphate
  modified_base 8: mod_base = OTHER; note = 2'-O-methylcytidine-3'-phosphate
  modified_base 9: mod_base = OTHER; note = 2'-O-methylcytidine-3'-phosphate
  modified_base 10: mod_base = OTHER; note = 2'-O-methyluridine-3'-phosphate
  modified_base 11: mod_base = OTHER; note = 2'-O-methylcytidine-3'-phosphate
  modified_base 12: mod_base = OTHER; note = 2'-fluoroadenosine-3'-phosphate
  modified_base 13: mod_base = OTHER; note = 2'-O-methyluridine-3'-phosphate
  modified_base 14: mod_base = OTHER; note = 2'-fluorouridine-3'-phosphate
  modified_base 15: mod_base = OTHER; note = 2'-O-methylguanosine-3'-phosphate
  modified_base 16: mod_base = OTHER; note = 2'-fluoroadenosine-3'-phosphate
  modified_base 17: mod_base = OTHER; note = 2'-O-methyluridine-3'-phosphate
  modified_base 18: mod_base = OTHER; note = 2'-O-methylguanosine-3'-phosphate
  modified_base 19: mod_base = OTHER; note = 2'-O-methyladenosine-3'-phosphate
  modified_base 20: mod_base = OTHER; note = 2'-O-methylcytidine-3'-phosphate
  modified_base 21: mod_base = OTHER; note = 2'-O-methyladenosine-3'-phosphorothioate
  modified_base 22: mod_base = OTHER; note = 2'-O-methyluridine-3'-phosphorothioate
  modified_base 23: mod_base = OTHER; note = 2'-O-methylcytidine-3'-phosphate
aaccaggcctcattgatgacatc

SEQ ID NO: 364 - RNA, 23 nt, synthetic construct
  source 1..23: mol_type = other RNA
  modified_base 1: mod_base = OTHER; note = 2'-O-methyladenosine-3'-phosphorothioate
  modified_base 2: mod_base = OTHER; note = 2'-fluorouridine-3'-phosphorothioate
  modified_base 3: mod_base = OTHER; note = 2'-O-methyladenosine-3'-phosphate
  modified_base 4: mod_base = OTHER; note = 2'-O-methylcytidine-3'-phosphate
  modified_base 5: mod_base = OTHER; note = 2'-O-methyladenosine-3'-phosphate
  modified_base 6: mod_base = OTHER; note = 2'-O-methylguanosine-3'-phosphate
  modified_base 7: mod_base = OTHER; note = 2'-fluorouridine-3'-phosphate
  modified_base 8: mod_base = OTHER; note = 2'-O-methylcytidine-3'-phosphate
  modified_base 9: mod_base = OTHER; note = 2'-O-methylcytidine-3'-phosphate
  modified_base 10: mod_base = OTHER; note = 2'-O-methyluridine-3'-phosphate
  modified_base 11: mod_base = OTHER; note = 2'-O-methylguanosine-3'-phosphate
  modified_base 12: mod_base = OTHER; note = 2'-fluorocytidine-3'-phosphate
  modified_base 13: mod_base = OTHER; note = 2'-O-methyladenosine-3'-phosphate
  modified_base 14: mod_base = OTHER; note = 2'-fluoroadenosine-3'-phosphate
  modified_base 15: mod_base = OTHER; note = 2'-O-methyladenosine-3'-phosphate
  modified_base 16: mod_base = OTHER; note = 2'-fluoroadenosine-3'-phosphate
  modified_base 17: mod_base = OTHER; note = 2'-O-methylcytidine-3'-phosphate
  modified_base 18: mod_base = OTHER; note = 2'-O-methyladenosine-3'-phosphate
  modified_base 19: mod_base = OTHER; note = 2'-O-methylguanosine-3'-phosphate
  modified_base 20: mod_base = OTHER; note = 2'-O-methylcytidine-3'-phosphate
  modified_base 21: mod_base = OTHER; note = 2'-O-methyluridine-3'-phosphorothioate
  modified_base 22: mod_base = OTHER; note = 2'-O-methylguanosine-3'-phosphorothioate
  modified_base 23: mod_base = OTHER; note = 2'-O-methylcytidine-3'-phosphate
atacagtcctgcaaaacagctgc

SEQ ID NO: 365 - RNA, 23 nt, synthetic construct
  source 1..23: mol_type = other RNA
  modified_base 1: mod_base = OTHER; note = 2'-O-methylcytidine-3'-phosphorothioate
  modified_base 2: mod_base = OTHER; note = 2'-fluorocytidine-3'-phosphorothioate
  modified_base 3: mod_base = OTHER; note = 2'-O-methyladenosine-3'-phosphate
  modified_base 4: mod_base = OTHER; note = 2'-O-methyluridine-3'-phosphate
  modified_base 5: mod_base = OTHER; note = 2'-O-methyladenosine-3'-phosphate
  modified_base 6: mod_base = OTHER; note = 2'-O-methylcytidine-3'-phosphate
  modified_base 7: mod_base = OTHER; note = 2'-fluoroadenosine-3'-phosphate
  modified_base 8: mod_base = OTHER; note = 2'-O-methylguanosine-3'-phosphate
  modified_base 9: mod_base = OTHER; note = 2'-O-methyluridine-3'-phosphate
  modified_base 10: mod_base = OTHER; note = 2'-O-methylcytidine-3'-phosphate
  modified_base 11: mod_base = OTHER; note = 2'-O-methylcytidine-3'-phosphate
  modified_base 12: mod_base = OTHER; note = 2'-fluorouridine-3'-phosphate
  modified_base 13: mod_base = OTHER; note = 2'-O-methylguanosine-3'-phosphate
  modified_base 14: mod_base = OTHER; note = 2'-fluorocytidine-3'-phosphate
  modified_base 15: mod_base = OTHER; note = 2'-O-methyladenosine-3'-phosphate
  modified_base 16: mod_base = OTHER; note = 2'-fluoroadenosine-3'-phosphate
  modified_base 17: mod_base = OTHER; note = 2'-O-methyladenosine-3'-phosphate
  modified_base 18: mod_base = OTHER; note = 2'-O-methyladenosine-3'-phosphate
  modified_base 19: mod_base = OTHER; note = 2'-O-methylcytidine-3'-phosphate
  modified_base 20: mod_base = OTHER; note = 2'-O-methyladenosine-3'-phosphate
  modified_base 21: mod_base = OTHER; note = 2'-O-methylguanosine-3'-phosphorothioate
  modified_base 22: mod_base = OTHER; note = 2'-O-methylcytidine-3'-phosphorothioate
  modified_base 23: mod_base = OTHER; note = 2'-O-methyluridine-3'-phosphate
ccatacagtcctgcaaaacagct

SEQ ID NO: 366 - RNA, 23 nt, synthetic construct
  source 1..23: mol_type = other RNA
  modified_base 1: mod_base = OTHER; note = 2'-O-methyladenosine-3'-phosphorothioate
  modified_base 2: mod_base = OTHER; note = 2'-fluoroguanosine-3'-phosphorothioate
  modified_base 3: mod_base = OTHER; note = 2'-O-methyluridine-3'-phosphate
  modified_base 4: mod_base = OTHER; note = 2'-O-methylguanosine-3'-phosphate
  modified_base 5: mod_base = OTHER; note = 2'-O-methyluridine-3'-phosphate
  modified_base 6: mod_base = OTHER; note = 2'-O-methylguanosine-3'-phosphate
  modified_base 7: mod_base = OTHER; note = 2'-fluorocytidine-3'-phosphate
  modified_base 8: mod_base = OTHER; note = 2'-O-methyluridine-3'-phosphate
  modified_base 9: mod_base = OTHER; note = 2'-O-methylguanosine-3'-phosphate
  modified_base 10: mod_base = OTHER; note = 2'-O-methyladenosine-3'-phosphate
  modified_base 11: mod_base = OTHER; note = 2'-O-methylcytidine-3'-phosphate
  modified_base 12: mod_base = OTHER; note = 2'-fluorocytidine-3'-phosphate
  modified_base 13: mod_base = OTHER; note = 2'-O-methyladenosine-3'-phosphate
  modified_base 14: mod_base = OTHER; note = 2'-fluorouridine-3'-phosphate
  modified_base 15: mod_base = OTHER; note = 2'-O-methyladenosine-3'-phosphate
  modified_base 16: mod_base = OTHER; note = 2'-fluorocytidine-3'-phosphate
  modified_base 17: mod_base = OTHER; note = 2'-O-methyladenosine-3'-phosphate
  modified_base 18: mod_base = OTHER; note = 2'-O-methylguanosine-3'-phosphate
  modified_base 19: mod_base = OTHER; note = 2'-O-methyluridine-3'-phosphate
  modified_base 20: mod_base = OTHER; note = 2'-O-methylcytidine-3'-phosphate
  modified_base 21: mod_base = OTHER; note = 2'-O-methylcytidine-3'-phosphorothioate
  modified_base 22: mod_base = OTHER; note = 2'-O-methyluridine-3'-phosphorothioate
  modified_base 23: mod_base = OTHER; note = 2'-O-methylguanosine-3'-phosphate
agtgtgctgaccatacagtcctg

SEQ ID NO: 367 - RNA, 23 nt, synthetic construct
  source 1..23: mol_type = other RNA
  modified_base 1: mod_base = OTHER; note = 2'-O-methylcytidine-3'-phosphorothioate
  modified_base 2: mod_base = OTHER; note = 2'-fluoroguanosine-3'-phosphorothioate
  modified_base 3: mod_base = OTHER; note = 2'-O-methyladenosine-3'-phosphate
  modified_base 4: mod_base = OTHER; note = 2'-O-methylguanosine-3'-phosphate
  modified_base 5: mod_base = OTHER; note = 2'-O-methyluridine-3'-phosphate
  modified_base 6: mod_base = OTHER; note = 2'-O-methylguanosine-3'-phosphate
  modified_base 7: mod_base = OTHER; note = 2'-fluorouridine-3'-phosphate
  modified_base 8: mod_base = OTHER; note = 2'-O-methylguanosine-3'-phosphate
  modified_base 9: mod_base = OTHER; note = 2'-O-methylcytidine-3'-phosphate
  modified_base 10: mod_base = OTHER; note = 2'-O-methyluridine-3'-phosphate
  modified_base 11: mod_base = OTHER; note = 2'-O-methylguanosine-3'-phosphate
  modified_base 12: mod_base = OTHER; note = 2'-fluoroadenosine-3'-phosphate
  modified_base 13: mod_base = OTHER; note = 2'-O-methylcytidine-3'-phosphate
  modified_base 14: mod_base = OTHER; note = 2'-fluorocytidine-3'-phosphate
  modified_base 15: mod_base = OTHER; note = 2'-O-methyladenosine-3'-phosphate
  modified_base 16: mod_base = OTHER; note = 2'-fluorouridine-3'-phosphate
  modified_base 17: mod_base = OTHER; note = 2'-O-methyladenosine-3'-phosphate
  modified_base 18: mod_base = OTHER; note = 2'-O-methylcytidine-3'-phosphate
  modified_base 19: mod_base = OTHER; note = 2'-O-methyladenosine-3'-phosphate
  modified_base 20: mod_base = OTHER; note = 2'-O-methylguanosine-3'-phosphate
  modified_base 21: mod_base = OTHER; note = 2'-O-methyluridine-3'-phosphorothioate
  modified_base 22: mod_base = OTHER; note = 2'-O-methylcytidine-3'-phosphorothioate
  modified_base 23: mod_base = OTHER; note = 2'-O-methylcytidine-3'-phosphate
cgagtgtgctgaccatacagtcc

SEQ ID NO: 368 - RNA, 23 nt, synthetic construct
  source 1..23: mol_type = other RNA
  modified_base 1: mod_base = OTHER; note = 2'-O-methyladenosine-3'-phosphorothioate
  modified_base 2: mod_base = OTHER; note = 2'-fluorocytidine-3'-phosphorothioate
  modified_base 3: mod_base = OTHER; note = 2'-O-methyluridine-3'-phosphate
  modified_base 4: mod_base = OTHER; note = 2'-O-methyluridine-3'-phosphate
  modified_base 5: mod_base = OTHER; note = 2'-O-methyluridine-3'-phosphate
  modified_base 6: mod_base = OTHER; note = 2'-O-methylguanosine-3'-phosphate
  modified_base 7: mod_base = OTHER; note = 2'-fluorocytidine-3'-phosphate
  modified_base 8: mod_base = OTHER; note = 2'-O-methyladenosine-3'-phosphate
  modified_base 9: mod_base = OTHER; note = 2'-O-methyluridine-3'-phosphate
  modified_base 10: mod_base = OTHER; note = 2'-O-methyluridine-3'-phosphate
  modified_base 11: mod_base = OTHER; note = 2'-O-methylcytidine-3'-phosphate
  modified_base 12: mod_base = OTHER; note = 2'-fluorocytidine-3'-phosphate
  modified_base 13: mod_base = OTHER; note = 2'-O-methyladenosine-3'-phosphate
  modified_base 14: mod_base = OTHER; note = 2'-fluoroguanosine-3'-phosphate
  modified_base 15: mod_base = OTHER; note = 2'-O-methyladenosine-3'-phosphate
  modified_base 16: mod_base = OTHER; note = 2'-fluorocytidine-3'-phosphate
  modified_base 17: mod_base = OTHER; note = 2'-O-methylcytidine-3'-phosphate
  modified_base 18: mod_base = OTHER; note = 2'-O-methyluridine-3'-phosphate
  modified_base 19: mod_base = OTHER; note = 2'-O-methylguanosine-3'-phosphate
  modified_base 20: mod_base = OTHER; note = 2'-O-methylguanosine-3'-phosphate
  modified_base 21: mod_base = OTHER; note = 2'-O-methylguanosine-3'-phosphorothioate
  modified_base 22: mod_base = OTHER; note = 2'-O-methylguanosine-3'-phosphorothioate
  modified_base 23: mod_base = OTHER; note = 2'-O-methylcytidine-3'-phosphate
actttgcattccagacctggggc

SEQ ID NO: 369 - RNA, 23 nt, synthetic construct
  source 1..23: mol_type = other RNA
  modified_base 1: mod_base = OTHER; note = 2'-O-methyluridine-3'-phosphorothioate
  modified_base 2: mod_base = OTHER; note = 2'-fluorocytidine-3'-phosphorothioate
  modified_base 3: mod_base = OTHER; note = 2'-O-methylcytidine-3'-phosphate
  modified_base 4: mod_base = OTHER; note = 2'-O-methyluridine-3'-phosphate
  modified_base 5: mod_base = OTHER; note = 2'-O-methyluridine-3'-phosphate
  modified_base 6: mod_base = OTHER; note = 2'-O-methylguanosine-3'-phosphate
  modified_base 7: mod_base = OTHER; note = 2'-fluoroadenosine-3'-phosphate
  modified_base 8: mod_base = OTHER; note = 2'-O-methylcytidine-3'-phosphate
  modified_base 9: mod_base = OTHER; note = 2'-O-methyluridine-3'-phosphate
  modified_base 10: mod_base = OTHER; note = 2'-O-methyluridine-3'-phosphate
  modified_base 11: mod_base = OTHER; note = 2'-O-methyluridine-3'-phosphate
  modified_base 12: mod_base = OTHER; note = 2'-fluoroguanosine-3'-phosphate
  modified_base 13: mod_base = OTHER; note = 2'-O-methylcytidine-3'-phosphate
  modified_base 14: mod_base = OTHER; note = 2'-fluoroadenosine-3'-phosphate
  modified_base 15: mod_base = OTHER; note = 2'-O-methyluridine-3'-phosphate
  modified_base 16: mod_base = OTHER; note = 2'-fluorouridine-3'-phosphate
  modified_base 17: mod_base = OTHER; note = 2'-O-methylcytidine-3'-phosphate
  modified_base 18: mod_base = OTHER; note = 2'-O-methylcytidine-3'-phosphate
  modified_base 19: mod_base = OTHER; note = 2'-O-methyladenosine-3'-phosphate
  modified_base 20: mod_base = OTHER; note = 2'-O-methylguanosine-3'-phosphate
  modified_base 21: mod_base = OTHER; note = 2'-O-methyladenosine-3'-phosphorothioate
  modified_base 22: mod_base = OTHER; note = 2'-O-methylcytidine-3'-phosphorothioate
  modified_base 23: mod_base = OTHER; note = 2'-O-methylcytidine-3'-phosphate
tccttgactttgcattccagacc

SEQ ID NO: 370 - RNA, 23 nt, synthetic construct
  source 1..23: mol_type = other RNA
  modified_base 1: mod_base = OTHER; note = 2'-O-methyluridine-3'-phosphorothioate
  modified_base 2: mod_base = OTHER; note = 2'-fluoroguanosine-3'-phosphorothioate
  modified_base 3: mod_base = OTHER; note = 2'-O-methyladenosine-3'-phosphate
  modified_base 4: mod_base = OTHER; note = 2'-O-methylcytidine-3'-phosphate
  modified_base 5: mod_base = OTHER; note = 2'-O-methyluridine-3'-phosphate
  modified_base 6: mod_base = OTHER; note = 2'-O-methyladenosine-3'-phosphate
  modified_base 7: mod_base = OTHER; note = 2'-fluorocytidine-3'-phosphate
  modified_base 8: mod_base = OTHER; note = 2'-O-methyladenosine-3'-phosphate
  modified_base 9: mod_base = OTHER; note = 2'-O-methylcytidine-3'-phosphate
  modified_base 10: mod_base = OTHER; note = 2'-O-methyladenosine-3'-phosphate
  modified_base 11: mod_base = OTHER; note = 2'-O-methylcytidine-3'-phosphate
  modified_base 12: mod_base = OTHER; note = 2'-fluoroguanosine-3'-phosphate
  modified_base 13: mod_base = OTHER; note = 2'-O-methyluridine-3'-phosphate
  modified_base 14: mod_base = OTHER; note = 2'-fluoroguanosine-3'-phosphate
  modified_base 15: mod_base = OTHER; note = 2'-O-methyluridine-3'-phosphate
  modified_base 16: mod_base = OTHER; note = 2'-fluorouridine-3'-phosphate
  modified_base 17: mod_base = OTHER; note = 2'-O-methylguanosine-3'-phosphate
  modified_base 18: mod_base = OTHER; note = 2'-O-methyluridine-3'-phosphate
  modified_base 19: mod_base = OTHER; note = 2'-O-methylcytidine-3'-phosphate
  modified_base 20: mod_base = OTHER; note = 2'-O-methyluridine-3'-phosphate
  modified_base 21: mod_base = OTHER; note = 2'-O-methyladenosine-3'-phosphorothioate
  modified_base 22: mod_base = OTHER; note = 2'-O-methylcytidine-3'-phosphorothioate
  modified_base 23: mod_base = OTHER; note = 2'-O-methylguanosine-3'-phosphate
tgactacacacgtgttgtctacg

SEQ ID NO: 371 - RNA, 23 nt, synthetic construct
  source 1..23: mol_type = other RNA
  modified_base 1: mod_base = OTHER; note = 2'-O-methylcytidine-3'-phosphorothioate
  modified_base 2: mod_base = OTHER; note = 2'-fluoroadenosine-3'-phosphorothioate
  modified_base 3: mod_base = OTHER; note = 2'-O-methyluridine-3'-phosphate
  modified_base 4: mod_base = OTHER; note = 2'-O-methyluridine-3'-phosphate
  modified_base 5: mod_base = OTHER; note = 2'-O-methyluridine-3'-phosphate
  modified_base 6: mod_base = OTHER; note = 2'-O-methyluridine-3'-phosphate
  modified_base 7: mod_base = OTHER; note = 2'-fluoroadenosine-3'-phosphate
  modified_base 8: mod_base = OTHER; note = 2'-O-methyladenosine-3'-phosphate
  modified_base 9: mod_base = OTHER; note = 2'-O-methyladenosine-3'-phosphate
  modified_base 10: mod_base = OTHER; note = 2'-O-methylguanosine-3'-phosphate
  modified_base 11: mod_base = OTHER; note = 2'-O-methylcytidine-3'-phosphate
  modified_base 12: mod_base = OTHER; note = 2'-fluorouridine-3'-phosphate
  modified_base 13: mod_base = OTHER; note = 2'-O-methylcytidine-3'-phosphate
  modified_base 14: mod_base = OTHER; note = 2'-fluoroadenosine-3'-phosphate
  modified_base 15: mod_base = OTHER; note = 2'-O-methylguanosine-3'-phosphate
  modified_base 16: mod_base = OTHER; note = 2'-fluorocytidine-3'-phosphate
  modified_base 17: mod_base = OTHER; note = 2'-O-methylcytidine-3'-phosphate
  modified_base 18: mod_base = OTHER; note = 2'-O-methylcytidine-3'-phosphate
  modified_base 19: mod_base = OTHER; note = 2'-O-methylcytidine-3'-phosphate
  modified_base 20: mod_base = OTHER; note = 2'-O-methyladenosine-3'-phosphate
  modified_base 21: mod_base = OTHER; note = 2'-O-methylguanosine-3'-phosphorothioate
  modified_base 22: mod_base = OTHER; note = 2'-O-methylcytidine-3'-phosphorothioate
  modified_base 23: mod_base = OTHER; note = 2'-O-methylcytidine-3'-phosphate
cattttaaagctcagccccagcc

SEQ ID NO: 372 - RNA, 23 nt, synthetic construct
  source 1..23: mol_type = other RNA
  modified_base 1: mod_base = OTHER; note = 2'-O-methylcytidine-3'-phosphorothioate
  modified_base 2: mod_base = OTHER; note = 2'-fluorocytidine-3'-phosphorothioate
  modified_base 3: mod_base = OTHER; note = 2'-O-methyladenosine-3'-phosphate
  modified_base 4: mod_base = OTHER; note = 2'-O-methyluridine-3'-phosphate
  modified_base 5: mod_base = OTHER; note = 2'-O-methyluridine-3'-phosphate
  modified_base 6: mod_base = OTHER; note = 2'-O-methyluridine-3'-phosphate
  modified_base 7: mod_base = OTHER; note = 2'-fluorouridine-3'-phosphate
  modified_base 8: mod_base = OTHER; note = 2'-O-methyladenosine-3'-phosphate
  modified_base 9: mod_base = OTHER; note = 2'-O-methyladenosine-3'-phosphate
  modified_base 10: mod_base = OTHER; note = 2'-O-methyladenosine-3'-phosphate
  modified_base 11: mod_base = OTHER; note = 2'-O-methylguanosine-3'-phosphate
  modified_base 12: mod_base = OTHER; note = 2'-fluorocytidine-3'-phosphate
  modified_base 13: mod_base = OTHER; note = 2'-O-methyluridine-3'-phosphate
  modified_base 14: mod_base = OTHER; note = 2'-fluorocytidine-3'-phosphate
  modified_base 15: mod_base = OTHER; note = 2'-O-methyladenosine-3'-phosphate
  modified_base 16: mod_base = OTHER; note = 2'-fluoroguanosine-3'-phosphate
  modified_base 17: mod_base = OTHER; note = 2'-O-methylcytidine-3'-phosphate
  modified_base 18: mod_base = OTHER; note = 2'-O-methylcytidine-3'-phosphate
  modified_base 19: mod_base = OTHER; note = 2'-O-methylcytidine-3'-phosphate
  modified_base 20: mod_base = OTHER; note = 2'-O-methylcytidine-3'-phosphate
  modified_base 21: mod_base = OTHER; note = 2'-O-methyladenosine-3'-phosphorothioate
  modified_base 22: mod_base = OTHER; note = 2'-O-methylguanosine-3'-phosphorothioate
  modified_base 23: mod_base = OTHER; note = 2'-O-methylcytidine-3'-phosphate
ccattttaaagctcagccccagc

SEQ ID NO: 373 - RNA, 23 nt, synthetic construct
  source 1..23: mol_type = other RNA
  modified_base 1: mod_base = OTHER; note = 2'-O-methyladenosine-3'-phosphorothioate
  modified_base 2: mod_base = OTHER; note = 2'-fluorocytidine-3'-phosphorothioate
  modified_base 3: mod_base = OTHER; note = 2'-O-methylcytidine-3'-phosphate
  modified_base 4: mod_base = OTHER; note = 2'-O-methyladenosine-3'-phosphate
  modified_base 5: mod_base = OTHER; note = 2'-O-methyluridine-3'-phosphate
  modified_base 6: mod_base = OTHER; note = 2'-O-methyluridine-3'-phosphate
  modified_base 7: mod_base = OTHER; note = 2'-fluorouridine-3'-phosphate
  modified_base 8: mod_base = OTHER; note = 2'-O-methyluridine-3'-phosphate
  modified_base 9: mod_base = OTHER; note = 2'-O-methyladenosine-3'-phosphate
  modified_base 10: mod_base = OTHER; note = 2'-O-methyladenosine-3'-phosphate
  modified_base 11: mod_base = OTHER; note = 2'-O-methyladenosine-3'-phosphate
  modified_base 12: mod_base = OTHER; note = 2'-fluoroguanosine-3'-phosphate
  modified_base 13: mod_base = OTHER; note = 2'-O-methylcytidine-3'-phosphate
  modified_base 14: mod_base = OTHER; note = 2'-fluorouridine-3'-phosphate
  modified_base 15: mod_base = OTHER; note = 2'-O-methylcytidine-3'-phosphate
  modified_base 16: mod_base = OTHER; note = 2'-fluoroadenosine-3'-phosphate
  modified_base 17: mod_base = OTHER; note = 2'-O-methylguanosine-3'-phosphate
  modified_base 18: mod_base = OTHER; note = 2'-O-methylcytidine-3'-phosphate
  modified_base 19: mod_base = OTHER; note = 2'-O-methylcytidine-3'-phosphate
  modified_base 20: mod_base = OTHER; note = 2'-O-methylcytidine-3'-phosphate
  modified_base 21: mod_base = OTHER; note = 2'-O-methylcytidine-3'-phosphorothioate
  modified_base 22: mod_base = OTHER; note = 2'-O-methyladenosine-3'-phosphorothioate
  modified_base 23: mod_base = OTHER; note = 2'-O-methylguanosine-3'-phosphate
accattttaaagctcagccccag

SEQ ID NO: 374 - RNA, 23 nt, synthetic construct
  source 1..23: mol_type = other RNA
  modified_base 1: mod_base = OTHER; note = 2'-O-methyladenosine-3'-phosphorothioate
  modified_base 2: mod_base = OTHER; note = 2'-fluoroadenosine-3'-phosphorothioate
  modified_base 3: mod_base = OTHER; note = 2'-O-methylcytidine-3'-phosphate
  modified_base 4: mod_base = OTHER; note = 2'-O-methylcytidine-3'-phosphate
  modified_base 5: mod_base = OTHER; note = 2'-O-methyladenosine-3'-phosphate
  modified_base 6: mod_base = OTHER; note = 2'-O-methyluridine-3'-phosphate
  modified_base 7: mod_base = OTHER; note = 2'-fluorouridine-3'-phosphate
  modified_base 8: mod_base = OTHER; note = 2'-O-methyluridine-3'-phosphate
  modified_base 9: mod_base = OTHER; note = 2'-O-methyluridine-3'-phosphate
  modified_base 10: mod_base = OTHER; note = 2'-O-methyladenosine-3'-phosphate
  modified_base 11: mod_base = OTHER; note = 2'-O-methyladenosine-3'-phosphate
  modified_base 12: mod_base = OTHER; note = 2'-fluoroadenosine-3'-phosphate
  modified_base 13: mod_base = OTHER; note = 2'-O-methylguanosine-3'-phosphate
  modified_base 14: mod_base = OTHER; note = 2'-fluorocytidine-3'-phosphate
  modified_base 15: mod_base = OTHER; note = 2'-O-methyluridine-3'-phosphate
  modified_base 16: mod_base = OTHER; note = 2'-fluorocytidine-3'-phosphate
  modified_base 17: mod_base = OTHER; note = 2'-O-methyladenosine-3'-phosphate
  modified_base 18: mod_base = OTHER; note = 2'-O-methylguanosine-3'-phosphate
  modified_base 19: mod_base = OTHER; note = 2'-O-methylcytidine-3'-phosphate
  modified_base 20: mod_base = OTHER; note = 2'-O-methylcytidine-3'-phosphate
  modified_base 21: mod_base = OTHER; note = 2'-O-methylcytidine-3'-phosphorothioate
  modified_base 22: mod_base = OTHER; note = 2'-O-methylcytidine-3'-phosphorothioate
  modified_base 23: mod_base = OTHER; note = 2'-O-methyladenosine-3'-phosphate
aaccattttaaagctcagcccca

SEQ ID NO: 375 - RNA, 23 nt, synthetic construct
  source 1..23: mol_type = other RNA
  modified_base 1: mod_base = OTHER; note = 2'-O-methylguanosine-3'-phosphorothioate
  modified_base 2: mod_base = OTHER; note = 2'-fluoroadenosine-3'-phosphorothioate
  modified_base 3: mod_base = OTHER; note = 2'-O-methyladenosine-3'-phosphate
  modified_base 4: mod_base = OTHER; note = 2'-O-methylcytidine-3'-phosphate
  modified_base 5: mod_base = OTHER; note = 2'-O-methylcytidine-3'-phosphate
  modified_base 6: mod_base = OTHER; note = 2'-O-methyladenosine-3'-phosphate
  modified_base 7: mod_base = OTHER; note = 2'-fluorouridine-3'-phosphate
  modified_base 8: mod_base = OTHER; note = 2'-O-methyluridine-3'-phosphate
  modified_base 9: mod_base = OTHER; note = 2'-O-methyluridine-3'-phosphate
  modified_base 10: mod_base = OTHER; note = 2'-O-methyluridine-3'-phosphate
  modified_base 11: mod_base = OTHER; note = 2'-O-methyladenosine-3'-phosphate
  modified_base 12: mod_base = OTHER; note = 2'-fluoroadenosine-3'-phosphate
  modified_base 13: mod_base = OTHER; note = 2'-O-methyladenosine-3'-phosphate
  modified_base 14: mod_base = OTHER; note = 2'-fluoroguanosine-3'-phosphate
  modified_base 15: mod_base = OTHER; note = 2'-O-methylcytidine-3'-phosphate
  modified_base 16: mod_base = OTHER; note = 2'-fluorouridine-3'-phosphate
  modified_base 17: mod_base = OTHER; note = 2'-O-methylcytidine-3'-phosphate
  modified_base 18: mod_base = OTHER; note = 2'-O-methyladenosine-3'-phosphate
  modified_base 19: mod_base = OTHER; note = 2'-O-methylguanosine-3'-phosphate
  modified_base 20: mod_base = OTHER; note = 2'-O-methylcytidine-3'-phosphate
  modified_base 21: mod_base = OTHER; note = 2'-O-methylcytidine-3'-phosphorothioate
  modified_base 22: mod_base = OTHER; note = 2'-O-methylcytidine-3'-phosphorothioate
  modified_base 23: mod_base = OTHER; note = 2'-O-methylcytidine-3'-phosphate
gaaccattttaaagctcagcccc

SEQ ID NO: 376 - RNA, 23 nt, synthetic construct
  source 1..23: mol_type = other RNA
  modified_base 1: mod_base = OTHER; note = 2'-O-methyladenosine-3'-phosphorothioate
  modified_base 2: mod_base = OTHER; note = 2'-fluoroguanosine-3'-phosphorothioate
  modified_base 3: mod_base = OTHER; note = 2'-O-methyluridine-3'-phosphate
  modified_base 4: mod_base = OTHER; note = 2'-O-methylcytidine-3'-phosphate
  modified_base 5: mod_base = OTHER; note = 2'-O-methylguanosine-3'-phosphate
  modified_base 6: mod_base = OTHER; note = 2'-O-methylguanosine-3'-phosphate
  modified_base 7: mod_base = OTHER; note = 2'-fluoroadenosine-3'-phosphate
  modified_base 8: mod_base = OTHER; note = 2'-O-methyladenosine-3'-phosphate
  modified_base 9: mod_base = OTHER; note = 2'-O-methylcytidine-3'-phosphate
  modified_base 10: mod_base = OTHER; note = 2'-O-methylcytidine-3'-phosphate
  modified_base 11: mod_base = OTHER; note = 2'-O-methyladenosine-3'-phosphate
  modified_base 12: mod_base = OTHER; note = 2'-fluorouridine-3'-phosphate
  modified_base 13: mod_base = OTHER; note = 2'-O-methyluridine-3'-phosphate
  modified_base 14: mod_base = OTHER; note = 2'-fluorouridine-3'-phosphate
  modified_base 15: mod_base = OTHER; note = 2'-O-methyluridine-3'-phosphate
  modified_base 16: mod_base = OTHER; note = 2'-fluoroadenosine-3'-phosphate
  modified_base 17: mod_base = OTHER; note = 2'-O-methyladenosine-3'-phosphate
  modified_base 18: mod_base = OTHER; note = 2'-O-methyladenosine-3'-phosphate
  modified_base 19: mod_base = OTHER; note = 2'-O-methylguanosine-3'-phosphate
  modified_base 20: mod_base = OTHER; note = 2'-O-methylcytidine-3'-phosphate
  modified_base 21: mod_base = OTHER; note = 2'-O-methyluridine-3'-phosphorothioate
  modified_base 22: mod_base = OTHER; note = 2'-O-methylcytidine-3'-phosphorothioate
  modified_base 23: mod_base = OTHER; note = 2'-O-methyladenosine-3'-phosphate
agtcggaaccattttaaagctca

SEQ ID NO: 377 - RNA, 23 nt, synthetic construct
  source 1..23: mol_type = other RNA
  modified_base 1: mod_base = OTHER; note = 2'-O-methyladenosine-3'-phosphorothioate
  modified_base 2: mod_base = OTHER; note = 2'-fluoroadenosine-3'-phosphorothioate
  modified_base 3: mod_base = OTHER; note = 2'-O-methylguanosine-3'-phosphate
  modified_base 4: mod_base = OTHER; note = 2'-O-methyluridine-3'-phosphate
  modified_base 5: mod_base = OTHER; note = 2'-O-methylcytidine-3'-phosphate
  modified_base 6: mod_base = OTHER; note = 2'-O-methylguanosine-3'-phosphate
  modified_base 7: mod_base = OTHER; note = 2'-fluoroguanosine-3'-phosphate
  modified_base 8: mod_base = OTHER; note = 2'-O-methyladenosine-3'-phosphate
  modified_base 9: mod_base = OTHER; note = 2'-O-methyladenosine-3'-phosphate
  modified_base 10: mod_base = OTHER; note = 2'-O-methylcytidine-3'-phosphate
  modified_base 11: mod_base = OTHER; note = 2'-O-methylcytidine-3'-phosphate
  modified_base 12: mod_base = OTHER; note = 2'-fluoroadenosine-3'-phosphate
  modified_base 13: mod_base = OTHER; note = 2'-O-methyluridine-3'-phosphate
  modified_base 14: mod_base = OTHER; note = 2'-fluorouridine-3'-phosphate
  modified_base 15: mod_base = OTHER; note = 2'-O-methyluridine-3'-phosphate
  modified_base 16: mod_base = OTHER; note = 2'-fluorouridine-3'-phosphate
  modified_base 17: mod_base = OTHER; note = 2'-O-methyladenosine-3'-phosphate
  modified_base 18: mod_base = OTHER; note = 2'-O-methyladenosine-3'-phosphate
  modified_base 19: mod_base = OTHER; note = 2'-O-methyladenosine-3'-phosphate
  modified_base 20: mod_base = OTHER; note = 2'-O-methylguanosine-3'-phosphate
  modified_base 21: mod_base = OTHER; note = 2'-O-methylcytidine-3'-phosphorothioate
  modified_base 22: mod_base = OTHER; note = 2'-O-methyluridine-3'-phosphorothioate
  modified_base 23: mod_base = OTHER; note = 2'-O-methylcytidine-3'-phosphate
aagtcggaaccattttaaagctc

SEQ ID NO: 378 - RNA, 23 nt, synthetic construct
  source 1..23: mol_type = other RNA
  modified_base 1: mod_base = OTHER; note = 2'-O-methyladenosine-3'-phosphorothioate
  modified_base 2: mod_base = OTHER; note = 2'-fluorocytidine-3'-phosphorothioate
  modified_base 3: mod_base = OTHER; note = 2'-O-methyladenosine-3'-phosphate
  modified_base 4: mod_base = OTHER; note = 2'-O-methyladenosine-3'-phosphate
  modified_base 5: mod_base = OTHER; note = 2'-O-methylguanosine-3'-phosphate
  modified_base 6: mod_base = OTHER; note = 2'-O-methyluridine-3'-phosphate
  modified_base 7: mod_base = OTHER; note = 2'-fluorocytidine-3'-phosphate
  modified_base 8: mod_base = OTHER; note = 2'-O-methylguanosine-3'-phosphate
  modified_base 9: mod_base = OTHER; note = 2'-O-methylguanosine-3'-phosphate
  modified_base 10: mod_base = OTHER; note = 2'-O-methyladenosine-3'-phosphate
  modified_base 11: mod_base = OTHER; note = 2'-O-methyladenosine-3'-phosphate
  modified_base 12: mod_base = OTHER; note = 2'-fluorocytidine-3'-phosphate
  modified_base 13: mod_base = OTHER; note = 2'-O-methylcytidine-3'-phosphate
  modified_base 14: mod_base = OTHER; note = 2'-fluoroadenosine-3'-phosphate
  modified_base 15: mod_base = OTHER; note = 2'-O-methyluridine-3'-phosphate
  modified_base 16: mod_base = OTHER; note = 2'-fluorouridine-3'-phosphate
  modified_base 17: mod_base = OTHER; note = 2'-O-methyluridine-3'-phosphate
  modified_base 18: mod_base = OTHER; note = 2'-O-methyluridine-3'-phosphate
  modified_base 19: mod_base = OTHER; note = 2'-O-methyladenosine-3'-phosphate
  modified_base 20: mod_base = OTHER; note = 2'-O-methyladenosine-3'-phosphate
  modified_base 21: mod_base = OTHER; note = 2'-O-methyladenosine-3'-phosphorothioate
  modified_base 22: mod_base = OTHER; note = 2'-O-methylguanosine-3'-phosphorothioate
  modified_base 23: mod_base = OTHER; note = 2'-O-methylcytidine-3'-phosphate
acaagtcggaaccattttaaagc

SEQ ID NO: 379 - RNA, 23 nt, synthetic construct
  source 1..23: mol_type = other RNA
  modified_base 1: mod_base = OTHER; note = 2'-O-methylcytidine-3'-phosphorothioate
  modified_base 2: mod_base = OTHER; note = 2'-fluoroadenosine-3'-phosphorothioate
  modified_base 3: mod_base = OTHER; note = 2'-O-methylcytidine-3'-phosphate
  modified_base 4: mod_base = OTHER; note = 2'-O-methyluridine-3'-phosphate
  modified_base 5: mod_base = OTHER; note = 2'-O-methylcytidine-3'-phosphate
  modified_base 6: mod_base = OTHER; note = 2'-O-methyladenosine-3'-phosphate
  modified_base 7: mod_base = OTHER; note = 2'-fluoroadenosine-3'-phosphate
  modified_base 8: mod_base = OTHER; note = 2'-O-methylguanosine-3'-phosphate
  modified_base 9: mod_base = OTHER; note = 2'-O-methylguanosine-3'-phosphate
  modified_base 10: mod_base = OTHER; note = 2'-O-methylguanosine-3'-phosphate
  modified_base 11: mod_base = OTHER; note = 2'-O-methylcytidine-3'-phosphate
  modified_base 12: mod_base = OTHER; note = 2'-fluorocytidine-3'-phosphate
  modified_base 13: mod_base = OTHER; note = 2'-O-methyladenosine-3'-phosphate
  modified_base 14: mod_base = OTHER; note = 2'-fluoroguanosine-3'-phosphate
  modified_base 15: mod_base = OTHER; note = 2'-O-methylguanosine-3'-phosphate
  modified_base 16: mod_base = OTHER; note = 2'-fluorocytidine-3'-phosphate
  modified_base 17: mod_base = OTHER; note = 2'-O-methylcytidine-3'-phosphate
  modified_base 18: mod_base = OTHER; note = 2'-O-methyladenosine-3'-phosphate
  modified_base 19: mod_base = OTHER; note = 2'-O-methylguanosine-3'-phosphate
  modified_base 20: mod_base = OTHER; note = 2'-O-methylcytidine-3'-phosphate
  modified_base 21: mod_base = OTHER; note = 2'-O-methyladenosine-3'-phosphorothioate
  modified_base 22: mod_base = OTHER; note = 2'-O-methylguanosine-3'-phosphorothioate
  modified_base 23: mod_base = OTHER; note = 2'-O-methylcytidine-3'-phosphate
cactcaagggccaggccagcagc

SEQ ID NO: 380 - RNA, 23 nt, synthetic construct
  source 1..23: mol_type = other RNA
  modified_base 1: mod_base = OTHER; note = 2'-O-methylcytidine-3'-phosphorothioate
  modified_base 2: mod_base = OTHER; note = 2'-fluorocytidine-3'-phosphorothioate
  modified_base 3: mod_base = OTHER; note = 2'-O-methyladenosine-3'-phosphate
  modified_base 4: mod_base = OTHER; note = 2'-O-methylcytidine-3'-phosphate
  modified_base 5: mod_base = OTHER; note = 2'-O-methyluridine-3'-phosphate
  modified_base 6: mod_base = OTHER; note = 2'-O-methylcytidine-3'-phosphate
  modified_base 7: mod_base = OTHER; note = 2'-fluoroadenosine-3'-phosphate
  modified_base 8: mod_base = OTHER; note = 2'-O-methyladenosine-3'-phosphate
  modified_base 9: mod_base = OTHER; note = 2'-O-methylguanosine-3'-phosphate
  modified_base 10: mod_base = OTHER; note = 2'-O-methylguanosine-3'-phosphate
  modified_base 11: mod_base = OTHER; note = 2'-O-methylguanosine-3'-phosphate
  modified_base 12: mod_base = OTHER; note = 2'-fluorocytidine-3'-phosphate
  modified_base 13: mod_base = OTHER; note = 2'-O-methylcytidine-3'-phosphate
  modified_base 14: mod_base = OTHER; note = 2'-fluoroadenosine-3'-phosphate
  modified_base 15: mod_base = OTHER; note = 2'-O-methylguanosine-3'-phosphate
  modified_base 16: mod_base = OTHER; note = 2'-fluoroguanosine-3'-phosphate
  modified_base 17: mod_base = OTHER; note = 2'-O-methylcytidine-3'-phosphate
  modified_base 18: mod_base = OTHER; note = 2'-O-methylcytidine-3'-phosphate
  modified_base 19: mod_base = OTHER; note = 2'-O-methyladenosine-3'-phosphate
  modified_base 20: mod_base = OTHER; note = 2'-O-methylguanosine-3'-phosphate
  modified_base 21: mod_base = OTHER; note = 2'-O-methylcytidine-3'-phosphorothioate
  modified_base 22: mod_base = OTHER; note = 2'-O-methyladenosine-3'-phosphorothioate
  modified_base 23: mod_base = OTHER; note = 2'-O-methylguanosine-3'-phosphate
ccactcaagggccaggccagcag

SEQ ID NO: 381 - RNA, 23 nt, synthetic construct
  source 1..23: mol_type = other RNA
  modified_base 1: mod_base = OTHER; note = 2'-O-methyluridine-3'-phosphorothioate
  modified_base 2: mod_base = OTHER; note = 2'-fluoroguanosine-3'-phosphorothioate
  modified_base 3: mod_base = OTHER; note = 2'-O-methyladenosine-3'-phosphate
  modified_base 4: mod_base = OTHER; note = 2'-O-methyladenosine-3'-phosphate
  modified_base 5: mod_base = OTHER; note = 2'-O-methyladenosine-3'-phosphate
  modified_base 6: mod_base = OTHER; note = 2'-O-methyluridine-3'-phosphate
  modified_base 7: mod_base = OTHER; note = 2'-fluoroguanosine-3'-phosphate
  modified_base 8: mod_base = OTHER; note = 2'-O-methylcytidine-3'-phosphate
  modified_base 9: mod_base = OTHER; note = 2'-O-methylcytidine-3'-phosphate
  modified_base 10: mod_base = OTHER; note = 2'-O-methylcytidine-3'-phosphate
  modified_base 11: mod_base = OTHER; note = 2'-O-methylcytidine-3'-phosphate
  modified_base 12: mod_base = OTHER; note = 2'-fluoroadenosine-3'-phosphate
  modified_base 13: mod_base = OTHER; note = 2'-O-methylcytidine-3'-phosphate
  modified_base 14: mod_base = OTHER; note = 2'-fluoroadenosine-3'-phosphate
  modified_base 15: mod_base = OTHER; note = 2'-O-methylguanosine-3'-phosphate
  modified_base 16: mod_base = OTHER; note = 2'-fluorouridine-3'-phosphate
  modified_base 17: mod_base = OTHER; note = 2'-O-methylguanosine-3'-phosphate
  modified_base 18: mod_base = OTHER; note = 2'-O-methyladenosine-3'-phosphate
  modified_base 19: mod_base = OTHER; note = 2'-O-methylguanosine-3'-phosphate
  modified_base 20: mod_base = OTHER; note = 2'-O-methylguanosine-3'-phosphate
  modified_base 21: mod_base = OTHER; note = 2'-O-methylguanosine-3'-phosphorothioate
  modified_base 22: mod_base = OTHER; note = 2'-O-methyladenosine-3'-phosphorothioate
  modified_base 23: mod_base = OTHER; note = 2'-O-methylguanosine-3'-phosphate
tgaaatgccccacagtgagggag

SEQ ID NO: 382 - RNA, 23 nt, synthetic construct
  source 1..23: mol_type = other RNA
  modified_base 1: mod_base = OTHER; note = 2'-O-methyladenosine-3'-phosphorothioate
  modified_base 2: mod_base = OTHER; note = 2'-fluorouridine-3'-phosphorothioate
  modified_base 3: mod_base = OTHER; note = 2'-O-methylguanosine-3'-phosphate
  modified_base 4: mod_base = OTHER; note = 2'-O-methylguanosine-3'-phosphate
  modified_base 5: mod_base = OTHER; note = 2'-O-methyluridine-3'-phosphate
  modified_base 6: mod_base = OTHER; note = 2'-O-methylguanosine-3'-phosphate
  modified_base 7: mod_base = OTHER; note = 2'-fluoroadenosine-3'-phosphate
  modified_base 8: mod_base = OTHER; note = 2'-O-methyladenosine-3'-phosphate
  modified_base 9: mod_base = OTHER; note = 2'-O-methyladenosine-3'-phosphate
  modified_base 10: mod_base = OTHER; note = 2'-O-methyluridine-3'-phosphate
  modified_base 11: mod_base = OTHER; note = 2'-O-methylguanosine-3'-phosphate
  modified_base 12: mod_base = OTHER; note = 2'-fluorocytidine-3'-phosphate
  modified_base 13: mod_base = OTHER; note = 2'-O-methylcytidine-3'-phosphate
  modified_base 14: mod_base = OTHER; note = 2'-fluorocytidine-3'-phosphate
  modified_base 15: mod_base = OTHER; note = 2'-O-methylcytidine-3'-phosphate
  modified_base 16: mod_base = OTHER; note = 2'-fluoroadenosine-3'-phosphate
  modified_base 17: mod_base = OTHER; note = 2'-O-methylcytidine-3'-phosphate
  modified_base 18: mod_base = OTHER; note = 2'-O-methyladenosine-3'-phosphate
  modified_base 19: mod_base = OTHER; note = 2'-O-methylguanosine-3'-phosphate
  modified_base 20: mod_base = OTHER; note = 2'-O-methyluridine-3'-phosphate
  modified_base 21: mod_base = OTHER; note = 2'-O-methylguanosine-3'-phosphorothioate
  modified_base 22: mod_base = OTHER; note = 2'-O-methyladenosine-3'-phosphorothioate
  modified_base 23: mod_base = OTHER; note = 2'-O-methylguanosine-3'-phosphate
atggtgaaatgccccacagtgag

SEQ ID NO: 383 - RNA, 23 nt, synthetic construct
  source 1..23: mol_type = other RNA
  modified_base 1: mod_base = OTHER; note = 2'-O-methylguanosine-3'-phosphorothioate
  modified_base 2: mod_base = OTHER; note = 2'-fluoroadenosine-3'-phosphorothioate
  modified_base 3: mod_base = OTHER; note = 2'-O-methyladenosine-3'-phosphate
  modified_base 4: mod_base = OTHER; note = 2'-O-methyluridine-3'-phosphate
  modified_base 5: mod_base = OTHER; note = 2'-O-methylguanosine-3'-phosphate
  modified_base 6: mod_base = OTHER; note = 2'-O-methylguanosine-3'-phosphate
  modified_base 7: mod_base = OTHER; note = 2'-fluorouridine-3'-phosphate
  modified_base 8: mod_base = OTHER; note = 2'-O-methylguanosine-3'-phosphate
  modified_base 9: mod_base = OTHER; note = 2'-O-methyladenosine-3'-phosphate
  modified_base 10: mod_base = OTHER; note = 2'-O-methyladenosine-3'-phosphate
  modified_base 11: mod_base = OTHER; note = 2'-O-methyladenosine-3'-phosphate
  modified_base 12: mod_base = OTHER; note = 2'-fluorouridine-3'-phosphate
  modified_base 13: mod_base = OTHER; note = 2'-O-methylguanosine-3'-phosphate
  modified_base 14: mod_base = OTHER; note = 2'-fluorocytidine-3'-phosphate
  modified_base 15: mod_base = OTHER; note = 2'-O-methylcytidine-3'-phosphate
  modified_base 16: mod_base = OTHER; note = 2'-fluorocytidine-3'-phosphate
  modified_base 17: mod_base = OTHER; note = 2'-O-methylcytidine-3'-phosphate
  modified_base 18: mod_base = OTHER; note = 2'-O-methyladenosine-3'-phosphate
  modified_base 19: mod_base = OTHER; note = 2'-O-methylcytidine-3'-phosphate
  modified_base 20: mod_base = OTHER; note = 2'-O-methyladenosine-3'-phosphate
  modified_base 21: mod_base = OTHER; note = 2'-O-methylguanosine-3'-phosphorothioate
  modified_base 22: mod_base = OTHER; note = 2'-O-methyluridine-3'-phosphorothioate
  modified_base 23: mod_base = OTHER; note = 2'-O-methylguanosine-3'-phosphate
gaatggtgaaatgccccacagtg

SEQ ID NO: 384 - RNA, 23 nt, synthetic construct
  source 1..23: mol_type = other RNA
  modified_base 1: mod_base = OTHER; note = 2'-O-methyluridine-3'-phosphorothioate
  modified_base 2: mod_base = OTHER; note = 2'-fluorouridine-3'-phosphorothioate
  modified_base 3: mod_base = OTHER; note = 2'-O-methyluridine-3'-phosphate
  modified_base 4: mod_base = OTHER; note = 2'-O-methylguanosine-3'-phosphate
  modified_base 5: mod_base = OTHER; note = 2'-O-methyladenosine-3'-phosphate
  modified_base 6: mod_base = OTHER; note = 2'-O-methyladenosine-3'-phosphate
  modified_base 7: mod_base = OTHER; note = 2'-fluorouridine-3'-phosphate
  modified_base 8: mod_base = OTHER; note = 2'-O-methylguanosine-3'-phosphate
  modified_base 9: mod_base = OTHER; note = 2'-O-methylguanosine-3'-phosphate
  modified_base 10: mod_base = OTHER; note = 2'-O-methyluridine-3'-phosphate
  modified_base 11: mod_base = OTHER; note = 2'-O-methylguanosine-3'-phosphate
  modified_base 12: mod_base = OTHER; note = 2'-fluoroadenosine-3'-phosphate
  modified_base 13: mod_base = OTHER; note = 2'-O-methyladenosine-3'-phosphate
  modified_base 14: mod_base = OTHER; note = 2'-fluoroadenosine-3'-phosphate
  modified_base 15: mod_base = OTHER; note = 2'-O-methyluridine-3'-phosphate
  modified_base 16: mod_base = OTHER; note = 2'-fluoroguanosine-3'-phosphate
  modified_base 17: mod_base = OTHER; note = 2'-O-methylcytidine-3'-phosphate
  modified_base 18: mod_base = OTHER; note = 2'-O-methylcytidine-3'-phosphate
  modified_base 19: mod_base = OTHER; note = 2'-O-methylcytidine-3'-phosphate
  modified_base 20: mod_base = OTHER; note = 2'-O-methylcytidine-3'-phosphate
  modified_base 21: mod_base = OTHER; note = 2'-O-methyladenosine-3'-phosphorothioate
  modified_base 22: mod_base = OTHER; note = 2'-O-methylcytidine-3'-phosphorothioate
  modified_base 23: mod_base = OTHER; note = 2'-O-methyladenosine-3'-phosphate
tttgaatggtgaaatgccccaca

SEQ ID NO: 385 - RNA, 23 nt, synthetic construct
  source 1..23: mol_type = other RNA
  modified_base 1: mod_base = OTHER; note = 2'-O-methylcytidine-3'-phosphorothioate
  modified_base 2: mod_base = OTHER; note = 2'-fluorocytidine-3'-phosphorothioate
  modified_base 3: mod_base = OTHER; note = 2'-O-methyluridine-3'-phosphate
  modified_base 4: mod_base = OTHER; note = 2'-O-methylguanosine-3'-phosphate
  modified_base 5: mod_base = OTHER; note = 2'-O-methyluridine-3'-phosphate
  modified_base 6: mod_base = OTHER; note = 2'-O-methyluridine-3'-phosphate
  modified_base 7: mod_base = OTHER; note = 2'-fluorouridine-3'-phosphate
  modified_base 8: mod_base = OTHER; note = 2'-O-methylguanosine-3'-phosphate
  modified_base 9: mod_base = OTHER; note = 2'-O-methyladenosine-3'-phosphate
  modified_base 10: mod_base = OTHER; note = 2'-O-methyladenosine-3'-phosphate
  modified_base 11: mod_base = OTHER; note = 2'-O-methyluridine-3'-phosphate
  modified_base 12: mod_base = OTHER; note = 2'-fluoroguanosine-3'-phosphate
  modified_base 13: mod_base = OTHER; note = 2'-O-methylguanosine-3'-phosphate
  modified_base 14: mod_base = OTHER; note = 2'-fluorouridine-3'-phosphate
  modified_base 15: mod_base = OTHER; note = 2'-O-methylguanosine-3'-phosphate
  modified_base 16: mod_base = OTHER; note = 2'-fluoroadenosine-3'-phosphate
  modified_base 17: mod_base = OTHER; note = 2'-O-methyladenosine-3'-phosphate
  modified_base 18: mod_base = OTHER; note = 2'-O-methyladenosine-3'-phosphate
  modified_base 19: mod_base = OTHER; note = 2'-O-methyluridine-3'-phosphate
  modified_base 20: mod_base = OTHER; note = 2'-O-methylguanosine-3'-phosphate
  modified_base 21: mod_base = OTHER; note = 2'-O-methylcytidine-3'-phosphorothioate
  modified_base 22: mod_base = OTHER; note = 2'-O-methylcytidine-3'-phosphorothioate
  modified_base 23: mod_base = OTHER; note = 2'-O-methylcytidine-3'-phosphate
cctgtttgaatggtgaaatgccc

SEQ ID NO: 386 - RNA, 23 nt, synthetic construct
  source 1..23: mol_type = other RNA
  modified_base 1: mod_base = OTHER; note = 2'-O-methyladenosine-3'-phosphorothioate
  modified_base 2: mod_base = OTHER; note = 2'-fluorocytidine-3'-phosphorothioate
  modified_base 3: mod_base = OTHER; note = 2'-O-methylguanosine-3'-phosphate
  modified_base 4: mod_base = OTHER; note = 2'-O-methylguanosine-3'-phosphate
  modified_base 5: mod_base = OTHER; note = 2'-O-methyladenosine-3'-phosphate
  modified_base 6: mod_base = OTHER; note = 2'-O-methyladenosine-3'-phosphate
  modified_base 7: mod_base = OTHER; note = 2'-fluorocytidine-3'-phosphate
  modified_base 8: mod_base = OTHER; note = 2'-O-methyladenosine-3'-phosphate
  modified_base 9: mod_base = OTHER; note = 2'-O-methyladenosine-3'-phosphate
  modified_base 10: mod_base = OTHER; note = 2'-O-methylguanosine-3'-phosphate
  modified_base 11: mod_base = OTHER; note = 2'-O-methyladenosine-3'-phosphate
  modified_base 12: mod_base = OTHER; note = 2'-fluoroguanosine-3'-phosphate
  modified_base 13: mod_base = OTHER; note = 2'-O-methylcytidine-3'-phosphate
  modified_base 14: mod_base = OTHER; note = 2'-fluorouridine-3'-phosphate
  modified_base 15: mod_base = OTHER; note = 2'-O-methylcytidine-3'-phosphate
  modified_base 16: mod_base = OTHER; note = 2'-fluoroadenosine-3'-phosphate
  modified_base 17: mod_base = OTHER; note = 2'-O-methyladenosine-3'-phosphate
  modified_base 18: mod_base = OTHER; note = 2'-O-methyluridine-3'-phosphate
  modified_base 19: mod_base = OTHER; note = 2'-O-methyladenosine-3'-phosphate
  modified_base 20: mod_base = OTHER; note = 2'-O-methyladenosine-3'-phosphate
  modified_base 21: mod_base = OTHER; note = 2'-O-methyladenosine-3'-phosphorothioate
  modified_base 22: mod_base = OTHER; note = 2'-O-methyladenosine-3'-phosphorothioate
  modified_base 23: mod_base = OTHER; note = 2'-O-methylguanosine-3'-phosphate
acggaacaagagctcaataaaag

SEQ ID NO: 387 - RNA, 23 nt, synthetic construct
  source 1..23: mol_type = other RNA
  modified_base 1: mod_base = OTHER; note = 2'-O-methyladenosine-3'-phosphorothioate
  modified_base 2: mod_base = OTHER; note = 2'-fluorocytidine-3'-phosphorothioate
  modified_base 3: mod_base = OTHER; note = 2'-O-methyladenosine-3'-phosphate
  modified_base 4: mod_base = OTHER; note = 2'-O-methylguanosine-3'-phosphate
  modified_base 5: mod_base = OTHER; note = 2'-O-methyluridine-3'-phosphate
  modified_base 6: mod_base = OTHER; note = 2'-O-methyluridine-3'-phosphate
  modified_base 7: mod_base = OTHER; note = 2'-fluoroadenosine-3'-phosphate
  modified_base 8: mod_base = OTHER; note = 2'-O-methylguanosine-3'-phosphate
  modified_base 9: mod_base = OTHER; note = 2'-O-methylcytidine-3'-phosphate
  modified_base 10: mod_base = OTHER; note = 2'-O-methyluridine-3'-phosphate
  modified_base 11: mod_base = OTHER; note = 2'-O-methylguanosine-3'-phosphate
  modified_base 12: mod_base = OTHER; note = 2'-fluoroguanosine-3'-phosphate
  modified_base 13: mod_base = OTHER; note = 2'-O-methyladenosine-3'-phosphate
  modified_base 14: mod_base = OTHER; note = 2'-fluoroguanosine-3'-phosphate
  modified_base 15: mod_base = OTHER; note = 2'-O-methyladenosine-3'-phosphate
  modified_base 16: mod_base = OTHER; note = 2'-fluorouridine-3'-phosphate
  modified_base 17: mod_base = OTHER; note = 2'-O-methylguanosine-3'-phosphate
  modified_base 18: mod_base = OTHER; note = 2'-O-methyladenosine-3'-phosphate
  modified_base 19: mod_base = OTHER; note = 2'-O-methylguanosine-3'-phosphate
  modified_base 20: mod_base = OTHER; note = 2'-O-methylguanosine-3'-phosphate
  modified_base 21: mod_base = OTHER; note = 2'-O-methylguanosine-3'-phosphorothioate
  modified_base 22: mod_base = OTHER; note = 2'-O-methylcytidine-3'-phosphorothioate
  modified_base 23: mod_base = OTHER; note = 2'-O-methylcytidine-3'-phosphate
acagttagctggagatgagggcc

SEQ ID NO: 388 - RNA, 23 nt, synthetic construct
  source 1..23: mol_type = other RNA
  modified_base 1: mod_base = OTHER; note = 2'-O-methyladenosine-3'-phosphorothioate
  modified_base 2: mod_base = OTHER; note = 2'-fluoroadenosine-3'-phosphorothioate
  modified_base 3: mod_base = OTHER; note = 2'-O-methyluridine-3'-phosphate
  modified_base 4: mod_base = OTHER; note = 2'-O-methylcytidine-3'-phosphate
  modified_base 5: mod_base = OTHER; note = 2'-O-methyluridine-3'-phosphate
  modified_base 6: mod_base = OTHER; note = 2'-O-methylguanosine-3'-phosphate
  modified_base 7: mod_base = OTHER; note = 2'-fluorocytidine-3'-phosphate
  modified_base 8: mod_base = OTHER; note = 2'-O-methylguanosine-3'-phosphate
  modified_base 9: mod_base = OTHER; note = 2'-O-methyluridine-3'-phosphate
  modified_base 10: mod_base = OTHER; note = 2'-O-methyluridine-3'-phosphate
  modified_base 11: mod_base = OTHER; note = 2'-O-methyluridine-3'-phosphate
  modified_base 12: mod_base = OTHER; note = 2'-fluorocytidine-3'-phosphate
  modified_base 13: mod_base = OTHER; note = 2'-O-methyluridine-3'-phosphate
  modified_base 14: mod_base = OTHER; note = 2'-fluoroguanosine-3'-phosphate
  modified_base 15: mod_base = OTHER; note = 2'-O-methylguanosine-3'-phosphate
  modified_base 16: mod_base = OTHER; note = 2'-fluorocytidine-3'-phosphate
  modified_base 17: mod_base = OTHER; note = 2'-O-methyluridine-3'-phosphate
  modified_base 18: mod_base = OTHER; note = 2'-O-methylcytidine-3'-phosphate
  modified_base 19: mod_base = OTHER; note = 2'-O-methyladenosine-3'-phosphate
  modified_base 20: mod_base = OTHER; note = 2'-O-methylguanosine-3'-phosphate
  modified_base 21: mod_base = OTHER; note = 2'-O-methyluridine-3'-phosphorothioate
  modified_base 22: mod_base = OTHER; note = 2'-O-methyluridine-3'-phosphorothioate
  modified_base 23: mod_base = OTHER; note = 2'-O-methylcytidine-3'-phosphate
aatctgcgtttctggctcagttc

SEQ ID NO: 389 - RNA, 23 nt, synthetic construct
  source 1..23: mol_type = other RNA
  modified_base 1: mod_base = OTHER; note = 2'-O-methylcytidine-3'-phosphorothioate
  modified_base 2: mod_base = OTHER; note = 2'-fluorocytidine-3'-phosphorothioate
  modified_base 3: mod_base = OTHER; note = 2'-O-methyladenosine-3'-phosphate
  modified_base 4: mod_base = OTHER; note = 2'-O-methyladenosine-3'-phosphate
  modified_base 5: mod_base = OTHER; note = 2'-O-methyluridine-3'-phosphate
  modified_base 6: mod_base = OTHER; note = 2'-O-methylcytidine-3'-phosphate
  modified_base 7: mod_base = OTHER; note = 2'-fluorouridine-3'-phosphate
  modified_base 8: mod_base = OTHER; note = 2'-O-methylguanosine-3'-phosphate
  modified_base 9: mod_base = OTHER; note = 2'-O-methylcytidine-3'-phosphate
  modified_base 10: mod_base = OTHER; note = 2'-O-methylguanosine-3'-phosphate
  modified_base 11: mod_base = OTHER; note = 2'-O-methyluridine-3'-phosphate
  modified_base 12: mod_base = OTHER; note = 2'-fluorouridine-3'-phosphate
  modified_base 13: mod_base = OTHER; note = 2'-O-methyluridine-3'-phosphate
  modified_base 14: mod_base = OTHER; note = 2'-fluorocytidine-3'-phosphate
  modified_base 15: mod_base = OTHER; note = 2'-O-methyluridine-3'-phosphate
  modified_base 16: mod_base = OTHER; note = 2'-fluoroguanosine-3'-phosphate
  modified_base 17: mod_base = OTHER; note = 2'-O-methylguanosine-3'-phosphate
  modified_base 18: mod_base = OTHER; note = 2'-O-methylcytidine-3'-phosphate
  modified_base 19: mod_base = OTHER; note = 2'-O-methyluridine-3'-phosphate
  modified_base 20: mod_base = OTHER; note = 2'-O-methylcytidine-3'-phosphate
  modified_base 21: mod_base = OTHER; note = 2'-O-methyladenosine-3'-phosphorothioate
  modified_base 22: mod_base = OTHER; note = 2'-O-methylguanosine-3'-phosphorothioate
  modified_base 23: mod_base = OTHER; note = 2'-O-methyluridine-3'-phosphate
ccaatctgcgtttctggctcagt

SEQ ID NO: 390 - RNA, 23 nt, synthetic construct
  source 1..23: mol_type = other RNA
  modified_base 1: mod_base = OTHER; note = 2'-O-methyladenosine-3'-phosphorothioate
  modified_base 2: mod_base = OTHER; note = 2'-fluoroguanosine-3'-phosphorothioate
  modified_base 3: mod_base = OTHER; note = 2'-O-methyluridine-3'-phosphate
  modified_base 4: mod_base = OTHER; note = 2'-O-methyladenosine-3'-phosphate
  modified_base 5: mod_base = OTHER; note = 2'-O-methyladenosine-3'-phosphate
  modified_base 6: mod_base = OTHER; note = 2'-O-methylguanosine-3'-phosphate
  modified_base 7: mod_base = OTHER; note = 2'-fluoroadenosine-3'-phosphate
  modified_base 8: mod_base = OTHER; note = 2'-O-methyladenosine-3'-phosphate
  modified_base 9: mod_base = OTHER; note = 2'-O-methylguanosine-3'-phosphate
  modified_base 10: mod_base = OTHER; note = 2'-O-methyladenosine-3'-phosphate
  modified_base 11: mod_base = OTHER; note = 2'-O-methylguanosine-3'-phosphate
  modified_base 12: mod_base = OTHER; note = 2'-fluoroguanosine-3'-phosphate
  modified_base 13: mod_base = OTHER; note = 2'-O-methylcytidine-3'-phosphate
  modified_base 14: mod_base = OTHER; note = 2'-fluorouridine-3'-phosphate
  modified_base 15: mod_base = OTHER; note = 2'-O-methyluridine-3'-phosphate
  modified_base 16: mod_base = OTHER; note = 2'-fluoroguanosine-3'-phosphate
  modified_base 17: mod_base = OTHER; note = 2'-O-methylguanosine-3'-phosphate
  modified_base 18: mod_base = OTHER; note = 2'-O-methylcytidine-3'-phosphate
  modified_base 19: mod_base = OTHER; note = 2'-O-methyluridine-3'-phosphate
  modified_base 20: mod_base = OTHER; note = 2'-O-methyluridine-3'-phosphate
  modified_base 21: mod_base = OTHER; note = 2'-O-methylcytidine-3'-phosphorothioate
  modified_base 22: mod_base = OTHER; note = 2'-O-methyladenosine-3'-phosphorothioate
  modified_base 23: mod_base = OTHER; note = 2'-O-methylguanosine-3'-phosphate
agtaagaagaggcttggcttcag

SEQ ID NO: 391 - RNA, 23 nt, synthetic construct
  source 1..23: mol_type = other RNA
  modified_base 1: mod_base = OTHER; note = 2'-O-methylguanosine-3'-phosphorothioate
  modified_base 2: mod_base = OTHER; note = 2'-fluoroadenosine-3'-phosphorothioate
  modified_base 3: mod_base = OTHER; note = 2'-O-methyladenosine-3'-phosphate
  modified_base 4: mod_base = OTHER; note = 2'-O-methylguanosine-3'-phosphate
  modified_base 5: mod_base = OTHER; note = 2'-O-methyluridine-3'-phosphate
  modified_base 6: mod_base = OTHER; note = 2'-O-methyladenosine-3'-phosphate
  modified_base 7: mod_base = OTHER; note = 2'-fluoroadenosine-3'-phosphate
  modified_base 8: mod_base = OTHER; note = 2'-O-methylguanosine-3'-phosphate
  modified_base 9: mod_base = OTHER; note = 2'-O-methyladenosine-3'-phosphate
  modified_base 10: mod_base = OTHER; note = 2'-O-methyladenosine-3'-phosphate
  modified_base 11: mod_base = OTHER; note = 2'-O-methylguanosine-3'-phosphate
  modified_base 12: mod_base = OTHER; note = 2'-fluoroadenosine-3'-phosphate
  modified_base 13: mod_base = OTHER; note = 2'-O-methylguanosine-3'-phosphate
  modified_base 14: mod_base = OTHER; note = 2'-fluoroguanosine-3'-phosphate
  modified_base 15: mod_base = OTHER; note = 2'-O-methylcytidine-3'-phosphate
  modified_base 16: mod_base = OTHER; note = 2'-fluorouridine-3'-phosphate
  modified_base 17: mod_base = OTHER; note = 2'-O-methyluridine-3'-phosphate
  modified_base 18: mod_base = OTHER; note = 2'-O-methylguanosine-3'-phosphate
  modified_base 19: mod_base = OTHER; note = 2'-O-methylguanosine-3'-phosphate
  modified_base 20: mod_base = OTHER; note = 2'-O-methylcytidine-3'-phosphate
  modified_base 21: mod_base = OTHER; note = 2'-O-methyluridine-3'-phosphorothioate
  modified_base 22: mod_base = OTHER; note = 2'-O-methyluridine-3'-phosphorothioate
  modified_base 23: mod_base = OTHER; note = 2'-O-methylcytidine-3'-phosphate
gaagtaagaagaggcttggcttc

SEQ ID NO: 392 - RNA, 23 nt, synthetic construct
  source 1..23: mol_type = other RNA
  modified_base 1: mod_base = OTHER; note = 2'-O-methyladenosine-3'-phosphorothioate
  modified_base 2: mod_base = OTHER; note = 2'-fluorouridine-3'-phosphorothioate
  modified_base 3: mod_base = OTHER; note = 2'-O-methyladenosine-3'-phosphate
  modified_base 4: mod_base = OTHER; note = 2'-O-methyladenosine-3'-phosphate
  modified_base 5: mod_base = OTHER; note = 2'-O-methyladenosine-3'-phosphate
  modified_base 6: mod_base = OTHER; note = 2'-O-methyluridine-3'-phosphate
  modified_base 7: mod_base = OTHER; note = 2'-fluoroguanosine-3'-phosphate
  modified_base 8: mod_base = OTHER; note = 2'-O-methyluridine-3'-phosphate
  modified_base 9: mod_base = OTHER; note = 2'-O-methylcytidine-3'-phosphate
  modified_base 10: mod_base = OTHER; note = 2'-O-methyluridine-3'-phosphate
  modified_base 11: mod_base = OTHER; note = 2'-O-methylguanosine-3'-phosphate
  modified_base 12: mod_base = OTHER; note = 2'-fluorocytidine-3'-phosphate
  modified_base 13: mod_base = OTHER; note = 2'-O-methyluridine-3'-phosphate
  modified_base 14: mod_base = OTHER; note = 2'-fluorouridine-3'-phosphate
  modified_base 15: mod_base = OTHER; note = 2'-O-methylguanosine-3'-phosphate
  modified_base 16: mod_base = OTHER; note = 2'-fluorocytidine-3'-phosphate
  modified_base 17: mod_base = OTHER; note = 2'-O-methyluridine-3'-phosphate
  modified_base 18: mod_base = OTHER; note = 2'-O-methyluridine-3'-phosphate
  modified_base 19: mod_base = OTHER; note = 2'-O-methylguanosine-3'-phosphate
  modified_base 20: mod_base = OTHER; note = 2'-O-methylguanosine-3'-phosphate
  modified_base 21: mod_base = OTHER; note = 2'-O-methylguanosine-3'-phosphorothioate
  modified_base 22: mod_base = OTHER; note = 2'-O-methyluridine-3'-phosphorothioate
  modified_base 23: mod_base = OTHER; note = 2'-O-methylguanosine-3'-phosphate
ataaatgtctgcttgcttgggtg

SEQ ID NO: 393 - RNA, 23 nt, synthetic construct
  source 1..23: mol_type = other RNA
  modified_base 1: mod_base = OTHER; note = 2'-O-methylguanosine-3'-phosphorothioate
  modified_base 2: mod_base = OTHER; note = 2'-fluoroadenosine-3'-phosphorothioate
  modified_base 3: mod_base = OTHER; note = 2'-O-methyluridine-3'-phosphate
  modified_base 4: mod_base = OTHER; note = 2'-O-methyladenosine-3'-phosphate
  modified_base 5: mod_base = OTHER; note = 2'-O-methyladenosine-3'-phosphate
  modified_base 6: mod_base = OTHER; note = 2'-O-methyladenosine-3'-phosphate
  modified_base 7: mod_base = OTHER; note = 2'-fluorouridine-3'-phosphate
  modified_base 8: mod_base = OTHER; note = 2'-O-methylguanosine-3'-phosphate
  modified_base 9: mod_base = OTHER; note = 2'-O-methyluridine-3'-phosphate
  modified_base 10: mod_base = OTHER; note = 2'-O-methylcytidine-3'-phosphate
  modified_base 11: mod_base = OTHER; note = 2'-O-methyluridine-3'-phosphate
  modified_base 12: mod_base = OTHER; note = 2'-fluoroguanosine-3'-phosphate
  modified_base 13: mod_base = OTHER; note = 2'-O-methylcytidine-3'-phosphate
  modified_base 14: mod_base = OTHER; note = 2'-fluorouridine-3'-phosphate
  modified_base 15: mod_base = OTHER; note = 2'-O-methyluridine-3'-phosphate
  modified_base 16: mod_base = OTHER; note = 2'-fluoroguanosine-3'-phosphate
  modified_base 17: mod_base = OTHER; note = 2'-O-methylcytidine-3'-phosphate
  modified_base 18: mod_base = OTHER; note = 2'-O-methyluridine-3'-phosphate
  modified_base 19: mod_base = OTHER; note = 2'-O-methyluridine-3'-phosphate
  modified_base 20: mod_base = OTHER; note = 2'-O-methylguanosine-3'-phosphate
  modified_base 21: mod_base = OTHER; note = 2'-O-methylguanosine-3'-phosphorothioate
  modified_base 22: mod_base = OTHER; note = 2'-O-methylguanosine-3'-phosphorothioate
  modified_base 23: mod_base = OTHER; note = 2'-O-methyluridine-3'-phosphate
gataaatgtctgcttgcttgggt

SEQ ID NO: 394 - RNA, 23 nt, synthetic construct
  source 1..23: mol_type = other RNA
  modified_base 1: mod_base = OTHER; note = 2'-O-methyladenosine-3'-phosphorothioate
  modified_base 2: mod_base = OTHER; note = 2'-fluorocytidine-3'-phosphorothioate
  modified_base 3: mod_base = OTHER; note = 2'-O-methyladenosine-3'-phosphate
  modified_base 4: mod_base = OTHER; note = 2'-O-methylguanosine-3'-phosphate
  modified_base 5: mod_base = OTHER; note = 2'-O-methyladenosine-3'-phosphate
  modified_base 6: mod_base = OTHER; note = 2'-O-methylguanosine-3'-phosphate
  modified_base 7: mod_base = OTHER; note = 2'-fluoroadenosine-3'-phosphate
  modified_base 8: mod_base = OTHER; note = 2'-O-methylguanosine-3'-phosphate
  modified_base 9: mod_base = OTHER; note = 2'-O-methylguanosine-3'-phosphate
  modified_base 10: mod_base = OTHER; note = 2'-O-methyladenosine-3'-phosphate
  modified_base 11: mod_base = OTHER; note = 2'-O-methylcytidine-3'-phosphate
  modified_base 12: mod_base = OTHER; note = 2'-fluoroadenosine-3'-phosphate
  modified_base 13: mod_base = OTHER; note = 2'-O-methylguanosine-3'-phosphate
  modified_base 14: mod_base = OTHER; note = 2'-fluoroadenosine-3'-phosphate
  modified_base 15: mod_base = OTHER; note = 2'-O-methylcytidine-3'-phosphate
  modified_base 16: mod_base = OTHER; note = 2'-fluorocytidine-3'-phosphate
  modified_base 17: mod_base = OTHER; note = 2'-O-methylcytidine-3'-phosphate
  modified_base 18: mod_base = OTHER; note = 2'-O-methyladenosine-3'-phosphate
  modified_base 19: mod_base = OTHER; note = 2'-O-methyladenosine-3'-phosphate
  modified_base 20: mod_base = OTHER; note = 2'-O-methyladenosine-3'-phosphate
  modified_base 21: mod_base = OTHER; note = 2'-O-methyladenosine-3'-phosphorothioate
  modified_base 22: mod_base = OTHER; note = 2'-O-methylguanosine-3'-phosphorothioate
  modified_base 23: mod_base = OTHER; note = 2'-O-methyladenosine-3'-phosphate
acagagaggacagacccaaaaga

SEQ ID NO: 395 - RNA, 23 nt, synthetic construct
  source 1..23: mol_type = other RNA
  modified_base 1: mod_base = OTHER; note = 2'-O-methyladenosine-3'-phosphorothioate
  modified_base 2: mod_base = OTHER; note = 2'-fluoroadenosine-3'-phosphorothioate
  modified_base 3: mod_base = OTHER; note = 2'-O-methyladenosine-3'-phosphate
  modified_base 4: mod_base = OTHER; note = 2'-O-methylguanosine-3'-phosphate
  modified_base 5: mod_base = OTHER; note = 2'-O-methylguanosine-3'-phosphate
  modified_base 6: mod_base = OTHER; note = 2'-O-methylcytidine-3'-phosphate
  modified_base 7: mod_base = OTHER; note = 2'-fluoroadenosine-3'-phosphate
  modified_base 8: mod_base = OTHER; note = 2'-O-methyladenosine-3'-phosphate
  modified_base 9: mod_base = OTHER; note = 2'-O-methylcytidine-3'-phosphate
  modified_base 10: mod_base = OTHER; note = 2'-O-methyladenosine-3'-phosphate
  modified_base 11: mod_base = OTHER; note = 2'-O-methylguanosine-3'-phosphate
  modified_base 12: mod_base = OTHER; note = 2'-fluoroadenosine-3'-phosphate
  modified_base 13: mod_base = OTHER; note = 2'-O-methylguanosine-3'-phosphate
  modified_base 14: mod_base = OTHER; note = 2'-fluoroadenosine-3'-phosphate
  modified_base 15: mod_base = OTHER; note = 2'-O-methylguanosine-3'-phosphate
  modified_base 16: mod_base = OTHER; note = 2'-fluoroguanosine-3'-phosphate
  modified_base 17: mod_base = OTHER; note = 2'-O-methyladenosine-3'-phosphate
  modified_base 18: mod_base = OTHER; note = 2'-O-methylcytidine-3'-phosphate
  modified_base 19: mod_base = OTHER; note = 2'-O-methyladenosine-3'-phosphate
  modified_base 20: mod_base = OTHER; note = 2'-O-methylguanosine-3'-phosphate
  modified_base 21: mod_base = OTHER; note = 2'-O-methyladenosine-3'-phosphorothioate
  modified_base 22: mod_base = OTHER; note = 2'-O-methylcytidine-3'-phosphorothioate
  modified_base 23: mod_base = OTHER; note = 2'-O-methylcytidine-3'-phosphate
aaaggcaacagagaggacagacc

SEQ ID NO: 396 - RNA, 23 nt, synthetic construct
  source 1..23: mol_type = other RNA
  modified_base 1: mod_base = OTHER; note = 2'-O-methyladenosine-3'-phosphorothioate
  modified_base 2: mod_base = OTHER; note = 2'-fluoroadenosine-3'-phosphorothioate
  modified_base 3: mod_base = OTHER; note = 2'-O-methyladenosine-3'-phosphate
  modified_base 4: mod_base = OTHER; note = 2'-O-methyladenosine-3'-phosphate
  modified_base 5: mod_base = OTHER; note = 2'-O-methylguanosine-3'-phosphate
  modified_base 6: mod_base = OTHER; note = 2'-O-methylguanosine-3'-phosphate
  modified_base 7: mod_base = OTHER; note = 2'-fluorocytidine-3'-phosphate
  modified_base 8: mod_base = OTHER; note = 2'-O-methyladenosine-3'-phosphate
  modified_base 9: mod_base = OTHER; note = 2'-O-methyladenosine-3'-phosphate
  modified_base 10: mod_base = OTHER; note = 2'-O-methylcytidine-3'-phosphate
  modified_base 11: mod_base = OTHER; note = 2'-O-methyladenosine-3'-phosphate
  modified_base 12: mod_base = OTHER; note = 2'-fluoroguanosine-3'-phosphate
  modified_base 13: mod_base = OTHER; note = 2'-O-methyladenosine-3'-phosphate
  modified_base 14: mod_base = OTHER; note = 2'-fluoroguanosine-3'-phosphate
  modified_base 15: mod_base = OTHER; note = 2'-O-methyladenosine-3'-phosphate
  modified_base 16: mod_base = OTHER; note = 2'-fluoroguanosine-3'-phosphate
  modified_base 17: mod_base = OTHER; note = 2'-O-methylguanosine-3'-phosphate
  modified_base 18: mod_base = OTHER; note = 2'-O-methyladenosine-3'-phosphate
  modified_base 19: mod_base = OTHER; note = 2'-O-methylcytidine-3'-phosphate
  modified_base 20: mod_base = OTHER; note = 2'-O-methyladenosine-3'-phosphate
  modified_base 21: mod_base = OTHER; note = 2'-O-methylguanosine-3'-phosphorothioate
  modified_base 22: mod_base = OTHER; note = 2'-O-methyladenosine-3'-phosphorothioate
  modified_base 23: mod_base = OTHER; note = 2'-O-methylcytidine-3'-phosphate
aaaaggcaacagagaggacagac

SEQ ID NO: 397 - RNA, 23 nt, synthetic construct
  source 1..23: mol_type = other RNA
  modified_base 1: mod_base = OTHER; note = 2'-O-methyladenosine-3'-phosphorothioate
  modified_base 2: mod_base = OTHER; note = 2'-fluoroadenosine-3'-phosphorothioate
  modified_base 3: mod_base = OTHER; note = 2'-O-methyladenosine-3'-phosphate
  modified_base 4: mod_base = OTHER; note = 2'-O-methyladenosine-3'-phosphate
  modified_base 5: mod_base = OTHER; note = 2'-O-methyladenosine-3'-phosphate
  modified_base 6: mod_base = OTHER; note = 2'-O-methylguanosine-3'-phosphate
  modified_base 7: mod_base = OTHER; note = 2'-fluoroguanosine-3'-phosphate
  modified_base 8: mod_base = OTHER; note = 2'-O-methylcytidine-3'-phosphate
  modified_base 9: mod_base = OTHER; note = 2'-O-methyladenosine-3'-phosphate
  modified_base 10: mod_base = OTHER; note = 2'-O-methyladenosine-3'-phosphate
  modified_base 11: mod_base = OTHER; note = 2'-O-methylcytidine-3'-phosphate
  modified_base 12: mod_base = OTHER; note = 2'-fluoroadenosine-3'-phosphate
  modified_base 13: mod_base = OTHER; note = 2'-O-methylguanosine-3'-phosphate
  modified_base 14: mod_base = OTHER; note = 2'-fluoroadenosine-3'-phosphate
  modified_base 15: mod_base = OTHER; note = 2'-O-methylguanosine-3'-phosphate
  modified_base 16: mod_base = OTHER; note = 2'-fluoroadenosine-3'-phosphate
  modified_base 17: mod_base = OTHER; note = 2'-O-methylguanosine-3'-phosphate
  modified_base 18: mod_base = OTHER; note = 2'-O-methylguanosine-3'-phosphate
  modified_base 19: mod_base = OTHER; note = 2'-O-methyladenosine-3'-phosphate
  modified_base 20: mod_base = OTHER; note = 2'-O-methylcytidine-3'-phosphate
  modified_base 21: mod_base = OTHER; note = 2'-O-methyladenosine-3'-phosphorothioate
  modified_base 22: mod_base = OTHER; note = 2'-O-methylguanosine-3'-phosphorothioate
  modified_base 23: mod_base = OTHER; note = 2'-O-methyladenosine-3'-phosphate
aaaaaggcaacagagaggacaga

SEQ ID NO: 398 - RNA, 23 nt, synthetic construct
  source 1..23: mol_type = other RNA
  modified_base 1: mod_base = OTHER; note = 2'-O-methyluridine-3'-phosphorothioate
  modified_base 2: mod_base = OTHER; note = 2'-fluoroadenosine-3'-phosphorothioate
  modified_base 3: mod_base = OTHER; note = 2'-O-methyladenosine-3'-phosphate
  modified_base 4: mod_base = OTHER; note = 2'-O-methyladenosine-3'-phosphate
  modified_base 5: mod_base = OTHER; note = 2'-O-methyladenosine-3'-phosphate
  modified_base 6: mod_base = OTHER; note = 2'-O-methyladenosine-3'-phosphate
  modified_base 7: mod_base = OTHER; note = 2'-fluoroguanosine-3'-phosphate
  modified_base 8: mod_base = OTHER; note = 2'-O-methylguanosine-3'-phosphate
  modified_base 9: mod_base = OTHER; note = 2'-O-methylcytidine-3'-phosphate
  modified_base 10: mod_base = OTHER; note = 2'-O-methyladenosine-3'-phosphate
  modified_base 11: mod_base = OTHER; note = 2'-O-methyladenosine-3'-phosphate
  modified_base 12: mod_base = OTHER; note = 2'-fluorocytidine-3'-phosphate
  modified_base 13: mod_base = OTHER; note = 2'-O-methyladenosine-3'-phosphate
  modified_base 14: mod_base = OTHER; note = 2'-fluoroguanosine-3'-phosphate
  modified_base 15: mod_base = OTHER; note = 2'-O-methyladenosine-3'-phosphate
  modified_base 16: mod_base = OTHER; note = 2'-fluoroguanosine-3'-phosphate
  modified_base 17: mod_base = OTHER; note = 2'-O-methyladenosine-3'-phosphate
  modified_base 18: mod_base = OTHER; note = 2'-O-methylguanosine-3'-phosphate
  modified_base 19: mod_base = OTHER; note = 2'-O-methylguanosine-3'-phosphate
  modified_base 20: mod_base = OTHER; note = 2'-O-methyladenosine-3'-phosphate
  modified_base 21: mod_base = OTHER; note = 2'-O-methylcytidine-3'-phosphorothioate
  modified_base 22: mod_base = OTHER; note = 2'-O-methyladenosine-3'-phosphorothioate
  modified_base 23: mod_base = OTHER; note = 2'-O-methylguanosine-3'-phosphate
taaaaaggcaacagagaggacag

SEQ ID NO: 399 - RNA, 23 nt, synthetic construct
  source 1..23: mol_type = other RNA
  modified_base 1: mod_base = OTHER; note = 2'-O-methyluridine-3'-phosphorothioate
  modified_base 2: mod_base = OTHER; note = 2'-fluoroguanosine-3'-phosphorothioate
  modified_base 3: mod_base = OTHER; note = 2'-O-methyluridine-3'-phosphate
  modified_base 4: mod_base = OTHER; note = 2'-O-methyladenosine-3'-phosphate
  modified_base 5: mod_base = OTHER; note = 2'-O-methyladenosine-3'-phosphate
  modified_base 6: mod_base = OTHER; note = 2'-O-methyladenosine-3'-phosphate
  modified_base 7: mod_base = OTHER; note = 2'-fluoroadenosine-3'-phosphate
  modified_base 8: mod_base = OTHER; note = 2'-O-methyladenosine-3'-phosphate
  modified_base 9: mod_base = OTHER; note = 2'-O-methylguanosine-3'-phosphate
  modified_base 10: mod_base = OTHER; note = 2'-O-methylguanosine-3'-phosphate
  modified_base 11: mod_base = OTHER; note = 2'-O-methylcytidine-3'-phosphate
  modified_base 12: mod_base = OTHER; note = 2'-fluoroadenosine-3'-phosphate
  modified_base 13: mod_base = OTHER; note = 2'-O-methyladenosine-3'-phosphate
  modified_base 14: mod_base = OTHER; note = 2'-fluorocytidine-3'-phosphate
  modified_base 15: mod_base = OTHER; note = 2'-O-methyladenosine-3'-phosphate
  modified_base 16: mod_base = OTHER; note = 2'-fluoroguanosine-3'-phosphate
  modified_base 17: mod_base = OTHER; note = 2'-O-methyladenosine-3'-phosphate
  modified_base 18: mod_base = OTHER; note = 2'-O-methylguanosine-3'-phosphate
  modified_base 19: mod_base = OTHER; note = 2'-O-methyladenosine-3'-phosphate
  modified_base 20: mod_base = OTHER; note = 2'-O-methylguanosine-3'-phosphate
  modified_base 21: mod_base = OTHER; note = 2'-O-methylguanosine-3'-phosphorothioate
  modified_base 22: mod_base = OTHER; note = 2'-O-methyladenosine-3'-phosphorothioate
  modified_base 23: mod_base = OTHER; note = 2'-O-methylcytidine-3'-phosphate
tgtaaaaaggcaacagagaggac

SEQ ID NO: 400 - RNA, 23 nt, synthetic construct
  source 1..23: mol_type = other RNA
  modified_base 1: mod_base = OTHER; note = 2'-O-methyladenosine-3'-phosphorothioate
  modified_base 2: mod_base = OTHER; note = 2'-fluoroguanosine-3'-phosphorothioate
  modified_base 3: mod_base = OTHER; note = 2'-O-methyluridine-3'-phosphate
  modified_base 4: mod_base = OTHER; note = 2'-O-methyluridine-3'-phosphate
  modified_base 5: mod_base = OTHER; note = 2'-O-methylguanosine-3'-phosphate
  modified_base 6: mod_base = OTHER; note = 2'-O-methylguanosine-3'-phosphate
  modified_base 7: mod_base = OTHER; note = 2'-fluorocytidine-3'-phosphate
  modified_base 8: mod_base = OTHER; note = 2'-O-methyluridine-3'-phosphate
  modified_base 9: mod_base = OTHER; note = 2'-O-methylguanosine-3'-phosphate
  modified_base 10: mod_base = OTHER; note = 2'-O-methyluridine-3'-phosphate
  modified_base 11: mod_base = OTHER; note = 2'-O-methyladenosine-3'-phosphate
  modified_base 12: mod_base = OTHER; note = 2'-fluoroadenosine-3'-phosphate
  modified_base 13: mod_base = OTHER; note = 2'-O-methyladenosine-3'-phosphate
  modified_base 14: mod_base = OTHER; note = 2'-fluoroadenosine-3'-phosphate
  modified_base 15: mod_base = OTHER; note = 2'-O-methyladenosine-3'-phosphate
  modified_base 16: mod_base = OTHER; note = 2'-fluoroguanosine-3'-phosphate
  modified_base 17: mod_base = OTHER; note = 2'-O-methylguanosine-3'-phosphate
  modified_base 18: mod_base = OTHER; note = 2'-O-methylcytidine-3'-phosphate
  modified_base 19: mod_base = OTHER; note = 2'-O-methyladenosine-3'-phosphate
  modified_base 20: mod_base = OTHER; note = 2'-O-methyladenosine-3'-phosphate
  modified_base 21: mod_base = OTHER; note = 2'-O-methylcytidine-3'-phosphorothioate
  modified_base 22: mod_base = OTHER; note = 2'-O-methyladenosine-3'-phosphorothioate
  modified_base 23: mod_base = OTHER; note = 2'-O-methylguanosine-3'-phosphate
agttggctgtaaaaaggcaacag

SEQ ID NO: 401 - RNA, 23 nt, synthetic construct
  source 1..23: mol_type = other RNA
  modified_base 1: mod_base = OTHER; note = 2'-O-methyladenosine-3'-phosphorothioate
  modified_base 2: mod_base = OTHER; note = 2'-fluoroadenosine-3'-phosphorothioate
  modified_base 3: mod_base = OTHER; note = 2'-O-methyladenosine-3'-phosphate
  modified_base 4: mod_base = OTHER; note = 2'-O-methylguanosine-3'-phosphate
  modified_base 5: mod_base = OTHER; note = 2'-O-methyluridine-3'-phosphate
  modified_base 6: mod_base = OTHER; note = 2'-O-methyluridine-3'-phosphate
  modified_base 7: mod_base = OTHER; note = 2'-fluoroguanosine-3'-phosphate
  modified_base 8: mod_base = OTHER; note = 2'-O-methylguanosine-3'-phosphate
  modified_base 9: mod_base = OTHER; note = 2'-O-methylcytidine-3'-phosphate
  modified_base 10: mod_base = OTHER; note = 2'-O-methyluridine-3'-phosphate
  modified_base 11: mod_base = OTHER; note = 2'-O-methylguanosine-3'-phosphate
  modified_base 12: mod_base = OTHER; note = 2'-fluorouridine-3'-phosphate
  modified_base 13: mod_base = OTHER; note = 2'-O-methyladenosine-3'-phosphate
  modified_base 14: mod_base = OTHER; note = 2'-fluoroadenosine-3'-phosphate
  modified_base 15: mod_base = OTHER; note = 2'-O-methyladenosine-3'-phosphate
  modified_base 16: mod_base = OTHER; note = 2'-fluoroadenosine-3'-phosphate
  modified_base 17: mod_base = OTHER; note = 2'-O-methyladenosine-3'-phosphate
  modified_base 18: mod_base = OTHER; note = 2'-O-methylguanosine-3'-phosphate
  modified_base 19: mod_base = OTHER; note = 2'-O-methylguanosine-3'-phosphate
  modified_base 20: mod_base = OTHER; note = 2'-O-methylcytidine-3'-phosphate
  modified_base 21: mod_base = OTHER; note = 2'-O-methyladenosine-3'-phosphorothioate
  modified_base 22: mod_base = OTHER; note = 2'-O-methyladenosine-3'-phosphorothioate
  modified_base 23: mod_base = OTHER; note = 2'-O-methylcytidine-3'-phosphate
aaagttggctgtaaaaaggcaac

SEQ ID NO: 402 - RNA, 23 nt, synthetic construct
  source 1..23: mol_type = other RNA
  modified_base 1: mod_base = OTHER; note = 2'-O-methylguanosine-3'-phosphorothioate
  modified_base 2: mod_base = OTHER; note = 2'-fluoroadenosine-3'-phosphorothioate
  modified_base 3: mod_base = OTHER; note = 2'-O-methyladenosine-3'-phosphate
  modified_base 4: mod_base = OTHER; note = 2'-O-methyladenosine-3'-phosphate
  modified_base 5: mod_base = OTHER; note = 2'-O-methyladenosine-3'-phosphate
  modified_base 6: mod_base = OTHER; note = 2'-O-methylguanosine-3'-phosphate
  modified_base 7: mod_base = OTHER; note = 2'-fluorouridine-3'-phosphate
  modified_base 8: mod_base = OTHER; note = 2'-O-methyluridine-3'-phosphate
  modified_base 9: mod_base = OTHER; note = 2'-O-methylguanosine-3'-phosphate
  modified_base 10: mod_base = OTHER; note = 2'-O-methylguanosine-3'-phosphate
  modified_base 11: mod_base = OTHER; note = 2'-O-methylcytidine-3'-phosphate
  modified_base 12: mod_base = OTHER; note = 2'-fluorouridine-3'-phosphate
  modified_base 13: mod_base = OTHER; note = 2'-O-methylguanosine-3'-phosphate
  modified_base 14: mod_base = OTHER; note = 2'-fluorouridine-3'-phosphate
  modified_base 15: mod_base = OTHER; note = 2'-O-methyladenosine-3'-phosphate
  modified_base 16: mod_base = OTHER; note = 2'-fluoroadenosine-3'-phosphate
  modified_base 17: mod_base = OTHER; note = 2'-O-methyladenosine-3'-phosphate
  modified_base 18: mod_base = OTHER; note = 2'-O-methyladenosine-3'-phosphate
  modified_base 19: mod_base = OTHER; note = 2'-O-methyladenosine-3'-phosphate
  modified_base 20: mod_base = OTHER; note = 2'-O-methylguanosine-3'-phosphate
  modified_base 21: mod_base = OTHER; note = 2'-O-methylguanosine-3'-phosphorothioate
  modified_base 22: mod_base = OTHER; note = 2'-O-methylcytidine-3'-phosphorothioate
  modified_base 23: mod_base = OTHER; note = 2'-O-methyladenosine-3'-phosphate
gaaaagttggctgtaaaaaggca

SEQ ID NO: 403 - RNA, 23 nt, synthetic construct
  source 1..23: mol_type = other RNA
  modified_base 1: mod_base = OTHER; note = 2'-O-methylcytidine-3'-phosphorothioate
  modified_base 2: mod_base = OTHER; note = 2'-fluorouridine-3'-phosphorothioate
  modified_base 3: mod_base = OTHER; note = 2'-O-methyladenosine-3'-phosphate
  modified_base 4: mod_base = OTHER; note = 2'-O-methylguanosine-3'-phosphate
  modified_base 5: mod_base = OTHER; note = 2'-O-methyladenosine-3'-phosphate
  modified_base 6: mod_base = OTHER; note = 2'-O-methyladenosine-3'-phosphate
  modified_base 7: mod_base = OTHER; note = 2'-fluoroadenosine-3'-phosphate
  modified_base 8: mod_base = OTHER; note = 2'-O-methyladenosine-3'-phosphate
  modified_base 9: mod_base = OTHER; note = 2'-O-methylguanosine-3'-phosphate
  modified_base 10: mod_base = OTHER; note = 2'-O-methyluridine-3'-phosphate
  modified_base 11: mod_base = OTHER; note = 2'-O-methyluridine-3'-phosphate
  modified_base 12: mod_base = OTHER; note = 2'-fluoroguanosine-3'-phosphate
  modified_base 13: mod_base = OTHER; note = 2'-O-methylguanosine-3'-phosphate
  modified_base 14: mod_base = OTHER; note = 2'-fluorocytidine-3'-phosphate
  modified_base 15: mod_base = OTHER; note = 2'-O-methyluridine-3'-phosphate
  modified_base 16: mod_base = OTHER; note = 2'-fluoroguanosine-3'-phosphate
  modified_base 17: mod_base = OTHER; note = 2'-O-methyluridine-3'-phosphate
  modified_base 18: mod_base = OTHER; note = 2'-O-methyladenosine-3'-phosphate
  modified_base 19: mod_base = OTHER; note = 2'-O-methyladenosine-3'-phosphate
  modified_base 20: mod_base = OTHER; note = 2'-O-methyladenosine-3'-phosphate
  modified_base 21: mod_base = OTHER; note = 2'-O-methyladenosine-3'-phosphorothioate
  modified_base 22: mod_base = OTHER; note = 2'-O-methyladenosine-3'-phosphorothioate
  modified_base 23: mod_base = OTHER; note = 2'-O-methylguanosine-3'-phosphate
ctagaaaagttggctgtaaaaag

SEQ ID NO: 404 - RNA, 23 nt, synthetic construct
  source 1..23: mol_type = other RNA
  modified_base 1: mod_base = OTHER; note = 2'-O-methyladenosine-3'-phosphorothioate
  modified_base 2: mod_base = OTHER; note = 2'-fluoroadenosine-3'-phosphorothioate
  modified_base 3: mod_base = OTHER; note = 2'-O-methylcytidine-3'-phosphate
  modified_base 4: mod_base = OTHER; note = 2'-O-methyladenosine-3'-phosphate
  modified_base 5: mod_base = OTHER; note = 2'-O-methylguanosine-3'-phosphate
  modified_base 6: mod_base = OTHER; note = 2'-O-methylguanosine-3'-phosphate
  modified_base 7: mod_base = OTHER; note = 2'-fluorouridine-3'-phosphate
  modified_base 8: mod_base = OTHER; note = 2'-O-methylcytidine-3'-phosphate
  modified_base 9: mod_base = OTHER; note = 2'-O-methyluridine-3'-phosphate
  modified_base 10: mod_base = OTHER; note = 2'-O-methyladenosine-3'-phosphate
  modified_base 11: mod_base = OTHER; note = 2'-O-methylguanosine-3'-phosphate
  modified_base 12: mod_base = OTHER; note = 2'-fluoroadenosine-3'-phosphate
  modified_base 13: mod_base = OTHER; note = 2'-O-methyladenosine-3'-phosphate
  modified_base 14: mod_base = OTHER; note = 2'-fluoroadenosine-3'-phosphate
  modified_base 15: mod_base = OTHER; note = 2'-O-methyladenosine-3'-phosphate
  modified_base 16: mod_base = OTHER; note = 2'-fluoroguanosine-3'-phosphate
  modified_base 17: mod_base = OTHER; note = 2'-O-methyluridine-3'-phosphate
  modified_base 18: mod_base = OTHER; note = 2'-O-methyluridine-3'-phosphate
  modified_base 19: mod_base = OTHER; note = 2'-O-methylguanosine-3'-phosphate
  modified_base 20: mod_base = OTHER; note = 2'-O-methylguanosine-3'-phosphate
  modified_base 21: mod_base = OTHER; note = 2'-O-methylcytidine-3'-phosphorothioate
  modified_base 22: mod_base = OTHER; note = 2'-O-methyluridine-3'-phosphorothioate
  modified_base 23: mod_base = OTHER; note = 2'-O-methylguanosine-3'-phosphate
aacaggtctagaaaagttggctg

SEQ ID NO: 405 - RNA, 23 nt, synthetic construct
  source 1..23: mol_type = other RNA
  modified_base 1: mod_base = OTHER; note = 2'-O-methyladenosine-3'-phosphorothioate
  modified_base 2: mod_base = OTHER; note = 2'-fluoroadenosine-3'-phosphorothioate
  modified_base 3: mod_base = OTHER; note = 2'-O-methyladenosine-3'-phosphate
  modified_base 4: mod_base = OTHER; note = 2'-O-methylcytidine-3'-phosphate
  modified_base 5: mod_base = OTHER; note = 2'-O-methyladenosine-3'-phosphate
  modified_base 6: mod_base = OTHER; note = 2'-O-methylguanosine-3'-phosphate
  modified_base 7: mod_base = OTHER; note = 2'-fluoroguanosine-3'-phosphate
  modified_base 8: mod_base = OTHER; note = 2'-O-methyluridine-3'-phosphate
  modified_base 9: mod_base = OTHER; note = 2'-O-methylcytidine-3'-phosphate
  modified_base 10: mod_base = OTHER; note = 2'-O-methyluridine-3'-phosphate
  modified_base 11: mod_base = OTHER; note = 2'-O-methyladenosine-3'-phosphate
  modified_base 12: mod_base = OTHER; note = 2'-fluoroguanosine-3'-phosphate
  modified_base 13: mod_base = OTHER; note = 2'-O-methyladenosine-3'-phosphate
  modified_base 14: mod_base = OTHER; note = 2'-fluoroadenosine-3'-phosphate
  modified_base 15: mod_base = OTHER; note = 2'-O-methyladenosine-3'-phosphate
  modified_base 16: mod_base = OTHER; note = 2'-fluoroadenosine-3'-phosphate
  modified_base 17: mod_base = OTHER; note = 2'-O-methylguanosine-3'-phosphate
  modified_base 18: mod_base = OTHER; note = 2'-O-methyluridine-3'-phosphate
  modified_base 19: mod_base = OTHER; note = 2'-O-methyluridine-3'-phosphate
  modified_base 20: mod_base = OTHER; note = 2'-O-methylguanosine-3'-phosphate
  modified_base 21: mod_base = OTHER; note = 2'-O-methylguanosine-3'-phosphorothioate
  modified_base 22: mod_base = OTHER; note = 2'-O-methylcytidine-3'-phosphorothioate
  modified_base 23: mod_base = OTHER; note = 2'-O-methyluridine-3'-phosphate
aaacaggtctagaaaagttggct

SEQ ID NO: 406 - RNA, 23 nt, synthetic construct
  source 1..23: mol_type = other RNA
  modified_base 1: mod_base = OTHER; note = 2'-O-methyladenosine-3'-phosphorothioate
  modified_base 2: mod_base = OTHER; note = 2'-fluoroadenosine-3'-phosphorothioate
  modified_base 3: mod_base = OTHER; note = 2'-O-methyladenosine-3'-phosphate
  modified_base 4: mod_base = OTHER; note = 2'-O-methyladenosine-3'-phosphate
  modified_base 5: mod_base = OTHER; note = 2'-O-methylcytidine-3'-phosphate
  modified_base 6: mod_base = OTHER; note = 2'-O-methyladenosine-3'-phosphate
  modified_base 7: mod_base = OTHER; note = 2'-fluoroguanosine-3'-phosphate
  modified_base 8: mod_base = OTHER; note = 2'-O-methylguanosine-3'-phosphate
  modified_base 9: mod_base = OTHER; note = 2'-O-methyluridine-3'-phosphate
  modified_base 10: mod_base = OTHER; note = 2'-O-methylcytidine-3'-phosphate
  modified_base 11: mod_base = OTHER; note = 2'-O-methyluridine-3'-phosphate
  modified_base 12: mod_base = OTHER; note = 2'-fluoroadenosine-3'-phosphate
  modified_base 13: mod_base = OTHER; note = 2'-O-methylguanosine-3'-phosphate
  modified_base 14: mod_base = OTHER; note = 2'-fluoroadenosine-3'-phosphate
  modified_base 15: mod_base = OTHER; note = 2'-O-methyladenosine-3'-phosphate
  modified_base 16: mod_base = OTHER; note = 2'-fluoroadenosine-3'-phosphate
  modified_base 17: mod_base = OTHER; note = 2'-O-methyladenosine-3'-phosphate
  modified_base 18: mod_base = OTHER; note = 2'-O-methylguanosine-3'-phosphate
  modified_base 19: mod_base = OTHER; note = 2'-O-methyluridine-3'-phosphate
  modified_base 20: mod_base = OTHER; note = 2'-O-methyluridine-3'-phosphate
  modified_base 21: mod_base = OTHER; note = 2'-O-methylguanosine-3'-phosphorothioate
  modified_base 22: mod_base = OTHER; note = 2'-O-methylguanosine-3'-phosphorothioate
  modified_base 23: mod_base = OTHER; note = 2'-O-methylcytidine-3'-phosphate
aaaacaggtctagaaaagttggc

SEQ ID NO: 407 - RNA, 23 nt, synthetic construct
  source 1..23: mol_type = other RNA
  modified_base 1: mod_base = OTHER; note = 2'-O-methylguanosine-3'-phosphorothioate
  modified_base 2: mod_base = OTHER; note = 2'-fluorocytidine-3'-phosphorothioate
  modified_base 3: mod_base = OTHER; note = 2'-O-methyladenosine-3'-phosphate
  modified_base 4: mod_base = OTHER; note = 2'-O-methyladenosine-3'-phosphate
  modified_base 5: mod_base = OTHER; note = 2'-O-methyladenosine-3'-phosphate
  modified_base 6: mod_base = OTHER; note = 2'-O-methyladenosine-3'-phosphate
  modified_base 7: mod_base = OTHER; note = 2'-fluorocytidine-3'-phosphate
  modified_base 8: mod_base = OTHER; note = 2'-O-methyladenosine-3'-phosphate
  modified_base 9: mod_base = OTHER; note = 2'-O-methylguanosine-3'-phosphate
  modified_base 10: mod_base = OTHER; note = 2'-O-methylguanosine-3'-phosphate
  modified_base 11: mod_base = OTHER; note = 2'-O-methyluridine-3'-phosphate
  modified_base 12: mod_base = OTHER; note = 2'-fluorocytidine-3'-phosphate
  modified_base 13: mod_base = OTHER; note = 2'-O-methyluridine-3'-phosphate
  modified_base 14: mod_base = OTHER; note = 2'-fluoroadenosine-3'-phosphate
  modified_base 15: mod_base = OTHER; note = 2'-O-methylguanosine-3'-phosphate
  modified_base 16: mod_base = OTHER; note = 2'-fluoroadenosine-3'-phosphate
  modified_base 17: mod_base = OTHER; note = 2'-O-methyladenosine-3'-phosphate
  modified_base 18: mod_base = OTHER; note = 2'-O-methyladenosine-3'-phosphate
  modified_base 19: mod_base = OTHER; note = 2'-O-methyladenosine-3'-phosphate
  modified_base 20: mod_base = OTHER; note = 2'-O-methylguanosine-3'-phosphate
  modified_base 21: mod_base = OTHER; note = 2'-O-methyluridine-3'-phosphorothioate
  modified_base 22: mod_base = OTHER; note = 2'-O-methyluridine-3'-phosphorothioate
  modified_base 23: mod_base = OTHER; note = 2'-O-methylguanosine-3'-phosphate
gcaaaacaggtctagaaaagttg

SEQ ID NO: 408 - RNA, 23 nt, synthetic construct
  source 1..23: mol_type = other RNA
  modified_base 1: mod_base = OTHER; note = 2'-O-methyladenosine-3'-phosphorothioate
  modified_base 2: mod_base = OTHER; note = 2'-fluoroadenosine-3'-phosphorothioate
  modified_base 3: mod_base = OTHER; note = 2'-O-methylguanosine-3'-phosphate
  modified_base 4: mod_base = OTHER; note = 2'-O-methylcytidine-3'-phosphate
  modified_base 5: mod_base = OTHER; note = 2'-O-methyladenosine-3'-phosphate
  modified_base 6: mod_base = OTHER; note = 2'-O-methyladenosine-3'-phosphate
  modified_base 7: mod_base = OTHER; note = 2'-fluoroadenosine-3'-phosphate
  modified_base 8: mod_base = OTHER; note = 2'-O-methyladenosine-3'-phosphate
  modified_base 9: mod_base = OTHER; note = 2'-O-methylcytidine-3'-phosphate
  modified_base 10: mod_base = OTHER; note = 2'-O-methyladenosine-3'-phosphate
  modified_base 11: mod_base = OTHER; note = 2'-O-methylguanosine-3'-phosphate
  modified_base 12: mod_base = OTHER; note = 2'-fluoroguanosine-3'-phosphate
  modified_base 13: mod_base = OTHER; note = 2'-O-methyluridine-3'-phosphate
  modified_base 14: mod_base = OTHER; note = 2'-fluorocytidine-3'-phosphate
  modified_base 15: mod_base = OTHER; note = 2'-O-methyluridine-3'-phosphate
  modified_base 16: mod_base = OTHER; note = 2'-fluoroadenosine-3'-phosphate
  modified_base 17: mod_base = OTHER; note = 2'-O-methylguanosine-3'-phosphate
  modified_base 18: mod_base = OTHER; note = 2'-O-methyladenosine-3'-phosphate
  modified_base 19: mod_base = OTHER; note = 2'-O-methyladenosine-3'-phosphate
  modified_base 20: mod_base = OTHER; note = 2'-O-methyladenosine-3'-phosphate
  modified_base 21: mod_base = OTHER; note = 2'-O-methyladenosine-3'-phosphorothioate
  modified_base 22: mod_base = OTHER; note = 2'-O-methylguanosine-3'-phosphorothioate
  modified_base 23: mod_base = OTHER; note = 2'-O-methyluridine-3'-phosphate
aagcaaaacaggtctagaaaagt

SEQ ID NO: 409 - RNA, 23 nt, synthetic construct
  source 1..23: mol_type = other RNA
  modified_base 1: mod_base = OTHER; note = 2'-O-methyladenosine-3'-phosphorothioate
  modified_base 2: mod_base = OTHER; note = 2'-fluoroadenosine-3'-phosphorothioate
  modified_base 3: mod_base = OTHER; note = 2'-O-methyladenosine-3'-phosphate
  modified_base 4: mod_base = OTHER; note = 2'-O-methylguanosine-3'-phosphate
  modified_base 5: mod_base = OTHER; note = 2'-O-methylcytidine-3'-phosphate
  modified_base 6: mod_base = OTHER; note = 2'-O-methyladenosine-3'-phosphate
  modified_base 7: mod_base = OTHER; note = 2'-fluoroadenosine-3'-phosphate
  modified_base 8: mod_base = OTHER; note = 2'-O-methyladenosine-3'-phosphate
  modified_base 9: mod_base = OTHER; note = 2'-O-methyladenosine-3'-phosphate
  modified_base 10: mod_base = OTHER; note = 2'-O-methylcytidine-3'-phosphate
  modified_base 11: mod_base = OTHER; note = 2'-O-methyladenosine-3'-phosphate
  modified_base 12: mod_base = OTHER; note = 2'-fluoroguanosine-3'-phosphate
  modified_base 13: mod_base = OTHER; note = 2'-O-methylguanosine-3'-phosphate
  modified_base 14: mod_base = OTHER; note = 2'-fluorouridine-3'-phosphate
  modified_base 15: mod_base = OTHER; note = 2'-O-methylcytidine-3'-phosphate
  modified_base 16: mod_base = OTHER; note = 2'-fluorouridine-3'-phosphate
  modified_base 17: mod_base = OTHER; note = 2'-O-methyladenosine-3'-phosphate
  modified_base 18: mod_base = OTHER; note = 2'-O-methylguanosine-3'-phosphate
  modified_base 19: mod_base = OTHER; note = 2'-O-methyladenosine-3'-phosphate
  modified_base 20: mod_base = OTHER; note = 2'-O-methyladenosine-3'-phosphate
  modified_base 21: mod_base = OTHER; note = 2'-O-methyladenosine-3'-phosphorothioate
  modified_base 22: mod_base = OTHER; note = 2'-O-methyladenosine-3'-phosphorothioate
  modified_base 23: mod_base = OTHER; note = 2'-O-methylguanosine-3'-phosphate
aaagcaaaacaggtctagaaaag

SEQ ID NO: 410 - RNA, 23 nt, synthetic construct
  source 1..23: mol_type = other RNA
  modified_base 1: mod_base = OTHER; note = 2'-O-methylcytidine-3'-phosphorothioate
  modified_base 2: mod_base = OTHER; note = 2'-fluoroadenosine-3'-phosphorothioate
  modified_base 3: mod_base = OTHER; note = 2'-O-methyladenosine-3'-phosphate
  modified_base 4: mod_base = OTHER; note = 2'-O-methyladenosine-3'-phosphate
  modified_base 5: mod_base = OTHER; note = 2'-O-methyladenosine-3'-phosphate
  modified_base 6: mod_base = OTHER; note = 2'-O-methylguanosine-3'-phosphate
  modified_base 7: mod_base = OTHER; note = 2'-fluorocytidine-3'-phosphate
  modified_base 8: mod_base = OTHER; note = 2'-O-methyladenosine-3'-phosphate
  modified_base 9: mod_base = OTHER; note = 2'-O-methyladenosine-3'-phosphate
  modified_base 10: mod_base = OTHER; note = 2'-O-methyladenosine-3'-phosphate
  modified_base 11: mod_base = OTHER; note = 2'-O-methyladenosine-3'-phosphate
  modified_base 12: mod_base = OTHER; note = 2'-fluorocytidine-3'-phosphate
  modified_base 13: mod_base = OTHER; note = 2'-O-methyladenosine-3'-phosphate
  modified_base 14: mod_base = OTHER; note = 2'-fluoroguanosine-3'-phosphate
  modified_base 15: mod_base = OTHER; note = 2'-O-methylguanosine-3'-phosphate
  modified_base 16: mod_base = OTHER; note = 2'-fluorouridine-3'-phosphate
  modified_base 17: mod_base = OTHER; note = 2'-O-methylcytidine-3'-phosphate
  modified_base 18: mod_base = OTHER; note = 2'-O-methyluridine-3'-phosphate
  modified_base 19: mod_base = OTHER; note = 2'-O-methyladenosine-3'-phosphate
  modified_base 20: mod_base = OTHER; note = 2'-O-methylguanosine-3'-phosphate
  modified_base 21: mod_base = OTHER; note = 2'-O-methyladenosine-3'-phosphorothioate
  modified_base 22: mod_base = OTHER; note = 2'-O-methyladenosine-3'-phosphorothioate
  modified_base 23: mod_base = OTHER; note = 2'-O-methyladenosine-3'-phosphate
caaaagcaaaacaggtctagaaa

SEQ ID NO: 411 - RNA, 23 nt, synthetic construct
  source 1..23: mol_type = other RNA
  modified_base 1: mod_base = OTHER; note = 2'-O-methyladenosine-3'-phosphorothioate
  modified_base 2: mod_base = OTHER; note = 2'-fluorocytidine-3'-phosphorothioate
  modified_base 3: mod_base = OTHER; note = 2'-O-methyladenosine-3'-phosphate
  modified_base 4: mod_base = OTHER; note = 2'-O-methyladenosine-3'-phosphate
  modified_base 5: mod_base = OTHER; note = 2'-O-methyladenosine-3'-phosphate
  modified_base 6: mod_base = OTHER; note = 2'-O-methyladenosine-3'-phosphate
  modified_base 7: mod_base = OTHER; note = 2'-fluoroguanosine-3'-phosphate
  modified_base 8: mod_base = OTHER; note = 2'-O-methylcytidine-3'-phosphate
  modified_base 9: mod_base = OTHER; note = 2'-O-methyladenosine-3'-phosphate
  modified_base 10: mod_base = OTHER; note = 2'-O-methyladenosine-3'-phosphate
  modified_base 11: mod_base = OTHER; note = 2'-O-methyladenosine-3'-phosphate
  modified_base 12: mod_base = OTHER; note = 2'-fluoroadenosine-3'-phosphate
  modified_base 13: mod_base = OTHER; note = 2'-O-methylcytidine-3'-phosphate
  modified_base 14: mod_base = OTHER; note = 2'-fluoroadenosine-3'-phosphate
  modified_base 15: mod_base = OTHER; note = 2'-O-methylguanosine-3'-phosphate
  modified_base 16: mod_base = OTHER; note = 2'-fluoroguanosine-3'-phosphate
  modified_base 17: mod_base = OTHER; note = 2'-O-methyluridine-3'-phosphate
  modified_base 18: mod_base = OTHER; note = 2'-O-methylcytidine-3'-phosphate
  modified_base 19: mod_base = OTHER; note = 2'-O-methyluridine-3'-phosphate
  modified_base 20: mod_base = OTHER; note = 2'-O-methyladenosine-3'-phosphate
  modified_base 21: mod_base = OTHER; note = 2'-O-methylguanosine-3'-phosphorothioate
  modified_base 22: mod_base = OTHER; note = 2'-O-methyladenosine-3'-phosphorothioate
  modified_base 23: mod_base = OTHER; note = 2'-O-methyladenosine-3'-phosphate
acaaaagcaaaacaggtctagaa

SEQ ID NO: 412 - RNA, 23 nt, synthetic construct
  source 1..23: mol_type = other RNA
  modified_base 1: mod_base = OTHER; note = 2'-O-methyluridine-3'-phosphorothioate
  modified_base 2: mod_base = OTHER; note = 2'-fluoroadenosine-3'-phosphorothioate
  modified_base 3: mod_base = OTHER; note = 2'-O-methylcytidine-3'-phosphate
  modified_base 4: mod_base = OTHER; note = 2'-O-methyladenosine-3'-phosphate
  modified_base 5: mod_base = OTHER; note = 2'-O-methyladenosine-3'-phosphate
  modified_base 6: mod_base = OTHER; note = 2'-O-methyladenosine-3'-phosphate
  modified_base 7: mod_base = OTHER; note = 2'-fluoroadenosine-3'-phosphate
  modified_base 8: mod_base = OTHER; note = 2'-O-methylguanosine-3'-phosphate
  modified_base 9: mod_base = OTHER; note = 2'-O-methylcytidine-3'-phosphate
  modified_base 10: mod_base = OTHER; note = 2'-O-methyladenosine-3'-phosphate
  modified_base 11: mod_base = OTHER; note = 2'-O-methyladenosine-3'-phosphate
  modified_base 12: mod_base = OTHER; note = 2'-fluoroadenosine-3'-phosphate
  modified_base 13: mod_base = OTHER; note = 2'-O-methyladenosine-3'-phosphate
  modified_base 14: mod_base = OTHER; note = 2'-fluorocytidine-3'-phosphate
  modified_base 15: mod_base = OTHER; note = 2'-O-methyladenosine-3'-phosphate
  modified_base 16: mod_base = OTHER; note = 2'-fluoroguanosine-3'-phosphate
  modified_base 17: mod_base = OTHER; note = 2'-O-methylguanosine-3'-phosphate
  modified_base 18: mod_base = OTHER; note = 2'-O-methyluridine-3'-phosphate
  modified_base 19: mod_base = OTHER; note = 2'-O-methylcytidine-3'-phosphate
  modified_base 20: mod_base = OTHER; note = 2'-O-methyluridine-3'-phosphate
  modified_base 21: mod_base = OTHER; note = 2'-O-methyladenosine-3'-phosphorothioate
  modified_base 22: mod_base = OTHER; note = 2'-O-methylguanosine-3'-phosphorothioate
  modified_base 23: mod_base = OTHER; note = 2'-O-methyladenosine-3'-phosphate
tacaaaagcaaaacaggtctaga

SEQ ID NO: 413 - RNA, 23 nt, synthetic construct
  source 1..23: mol_type = other RNA
  modified_base 1: mod_base = OTHER; note = 2'-O-methyluridine-3'-phosphorothioate
  modified_base 2: mod_base = OTHER; note = 2'-fluorouridine-3'-phosphorothioate
  modified_base 3: mod_base = OTHER; note = 2'-O-methyladenosine-3'-phosphate
  modified_base 4: mod_base = OTHER; note = 2'-O-methylcytidine-3'-phosphate
  modified_base 5: mod_base = OTHER; note = 2'-O-methyladenosine-3'-phosphate
  modified_base 6: mod_base = OTHER; note = 2'-O-methyladenosine-3'-phosphate
  modified_base 7: mod_base = OTHER; note = 2'-fluoroadenosine-3'-phosphate
  modified_base 8: mod_base = OTHER; note = 2'-O-methyladenosine-3'-phosphate
  modified_base 9: mod_base = OTHER; note = 2'-O-methylguanosine-3'-phosphate
  modified_base 10: mod_base = OTHER; note = 2'-O-methylcytidine-3'-phosphate
  modified_base 11: mod_base = OTHER; note = 2'-O-methyladenosine-3'-phosphate
  modified_base 12: mod_base = OTHER; note = 2'-fluoroadenosine-3'-phosphate
  modified_base 13: mod_base = OTHER; note = 2'-O-methyladenosine-3'-phosphate
  modified_base 14: mod_base = OTHER; note = 2'-fluoroadenosine-3'-phosphate
  modified_base 15: mod_base = OTHER; note = 2'-O-methylcytidine-3'-phosphate
  modified_base 16: mod_base = OTHER; note = 2'-fluoroadenosine-3'-phosphate
  modified_base 17: mod_base = OTHER; note = 2'-O-methylguanosine-3'-phosphate
  modified_base 18: mod_base = OTHER; note = 2'-O-methylguanosine-3'-phosphate
  modified_base 19: mod_base = OTHER; note = 2'-O-methyluridine-3'-phosphate
  modified_base 20: mod_base = OTHER; note = 2'-O-methylcytidine-3'-phosphate
  modified_base 21: mod_base = OTHER; note = 2'-O-methyluridine-3'-phosphorothioate
  modified_base 22: mod_base = OTHER; note = 2'-O-methyladenosine-3'-phosphorothioate
  modified_base 23: mod_base = OTHER; note = 2'-O-methylguanosine-3'-phosphate
ttacaaaagcaaaacaggtctag

SEQ ID NO: 414 - RNA, 23 nt, synthetic construct
  source 1..23: mol_type = other RNA
  modified_base 1: mod_base = OTHER; note = 2'-O-methylguanosine-3'-phosphorothioate
  modified_base 2: mod_base = OTHER; note = 2'-fluorouridine-3'-phosphorothioate
  modified_base 3: mod_base = OTHER; note = 2'-O-methyluridine-3'-phosphate
  modified_base 4: mod_base = OTHER; note = 2'-O-methyladenosine-3'-phosphate
  modified_base 5: mod_base = OTHER; note = 2'-O-methylcytidine-3'-phosphate
  modified_base 6: mod_base = OTHER; note = 2'-O-methyladenosine-3'-phosphate
  modified_base 7: mod_base = OTHER; note = 2'-fluoroadenosine-3'-phosphate
  modified_base 8: mod_base = OTHER; note = 2'-O-methyladenosine-3'-phosphate
  modified_base 9: mod_base = OTHER; note = 2'-O-methyladenosine-3'-phosphate
  modified_base 10: mod_base = OTHER; note = 2'-O-methylguanosine-3'-phosphate
  modified_base 11: mod_base = OTHER; note = 2'-O-methylcytidine-3'-phosphate
  modified_base 12: mod_base = OTHER; note = 2'-fluoroadenosine-3'-phosphate
  modified_base 13: mod_base = OTHER; note = 2'-O-methyladenosine-3'-phosphate
  modified_base 14: mod_base = OTHER; note = 2'-fluoroadenosine-3'-phosphate
  modified_base 15: mod_base = OTHER; note = 2'-O-methyladenosine-3'-phosphate
  modified_base 16: mod_base = OTHER; note = 2'-fluorocytidine-3'-phosphate
  modified_base 17: mod_base = OTHER; note = 2'-O-methyladenosine-3'-phosphate
  modified_base 18: mod_base = OTHER; note = 2'-O-methylguanosine-3'-phosphate
  modified_base 19: mod_base = OTHER; note = 2'-O-methylguanosine-3'-phosphate
  modified_base 20: mod_base = OTHER; note = 2'-O-methyluridine-3'-phosphate
  modified_base 21: mod_base = OTHER; note = 2'-O-methylcytidine-3'-phosphorothioate
  modified_base 22: mod_base = OTHER; note = 2'-O-methyluridine-3'-phosphorothioate
  modified_base 23: mod_base = OTHER; note = 2'-O-methyladenosine-3'-phosphate
gttacaaaagcaaaacaggtcta

SEQ ID NO: 415 - RNA, 23 nt, synthetic construct
  source 1..23: mol_type = other RNA
  modified_base 1: mod_base = OTHER; note = 2'-O-methyladenosine-3'-phosphorothioate
  modified_base 2: mod_base = OTHER; note = 2'-fluoroguanosine-3'-phosphorothioate
  modified_base 3: mod_base = OTHER; note = 2'-O-methyluridine-3'-phosphate
  modified_base 4: mod_base = OTHER; note = 2'-O-methyluridine-3'-phosphate
  modified_base 5: mod_base = OTHER; note = 2'-O-methyladenosine-3'-phosphate
  modified_base 6: mod_base = OTHER; note = 2'-O-methylcytidine-3'-phosphate
  modified_base 7: mod_base = OTHER; note = 2'-fluoroadenosine-3'-phosphate
  modified_base 8: mod_base = OTHER; note = 2'-O-methyladenosine-3'-phosphate
  modified_base 9: mod_base = OTHER; note = 2'-O-methyladenosine-3'-phosphate
  modified_base 10: mod_base = OTHER; note = 2'-O-methyladenosine-3'-phosphate
  modified_base 11: mod_base = OTHER; note = 2'-O-methylguanosine-3'-phosphate
  modified_base 12: mod_base = OTHER; note = 2'-fluorocytidine-3'-phosphate
  modified_base 13: mod_base = OTHER; note = 2'-O-methyladenosine-3'-phosphate
  modified_base 14: mod_base = OTHER; note = 2'-fluoroadenosine-3'-phosphate
  modified_base 15: mod_base = OTHER; note = 2'-O-methyladenosine-3'-phosphate
  modified_base 16: mod_base = OTHER; note = 2'-fluoroadenosine-3'-phosphate
  modified_base 17: mod_base = OTHER; note = 2'-O-methylcytidine-3'-phosphate
  modified_base 18: mod_base = OTHER; note = 2'-O-methyladenosine-3'-phosphate
  modified_base 19: mod_base = OTHER; note = 2'-O-methylguanosine-3'-phosphate
  modified_base 20: mod_base = OTHER; note = 2'-O-methylguanosine-3'-phosphate
  modified_base 21: mod_base = OTHER; note = 2'-O-methyluridine-3'-phosphorothioate
  modified_base 22: mod_base = OTHER; note = 2'-O-methylcytidine-3'-phosphorothioate
  modified_base 23: mod_base = OTHER; note = 2'-O-methyluridine-3'-phosphate
agttacaaaagcaaaacaggtct

SEQ ID NO: 416 - RNA, 23 nt, synthetic construct
  source 1..23: mol_type = other RNA
  modified_base 1: mod_base = OTHER; note = 2'-O-methylcytidine-3'-phosphorothioate
  modified_base 2: mod_base = OTHER; note = 2'-fluoroadenosine-3'-phosphorothioate
  modified_base 3: mod_base = OTHER; note = 2'-O-methyladenosine-3'-phosphate
  modified_base 4: mod_base = OTHER; note = 2'-O-methylguanosine-3'-phosphate
  modified_base 5: mod_base = OTHER; note = 2'-O-methyluridine-3'-phosphate
  modified_base 6: mod_base = OTHER; note = 2'-O-methyluridine-3'-phosphate
  modified_base 7: mod_base = OTHER; note = 2'-fluoroadenosine-3'-phosphate
  modified_base 8: mod_base = OTHER; note = 2'-O-methylcytidine-3'-phosphate
  modified_base 9: mod_base = OTHER; note = 2'-O-methyladenosine-3'-phosphate
  modified_base 10: mod_base = OTHER; note = 2'-O-methyladenosine-3'-phosphate
  modified_base 11: mod_base = OTHER; note = 2'-O-methyladenosine-3'-phosphate
  modified_base 12: mod_base = OTHER; note = 2'-fluoroadenosine-3'-phosphate
  modified_base 13: mod_base = OTHER; note = 2'-O-methylguanosine-3'-phosphate
  modified_base 14: mod_base = OTHER; note = 2'-fluorocytidine-3'-phosphate
  modified_base 15: mod_base = OTHER; note = 2'-O-methyladenosine-3'-phosphate
  modified_base 16: mod_base = OTHER; note = 2'-fluoroadenosine-3'-phosphate
  modified_base 17: mod_base = OTHER; note = 2'-O-methyladenosine-3'-phosphate
  modified_base 18: mod_base = OTHER; note = 2'-O-methyladenosine-3'-phosphate
  modified_base 19: mod_base = OTHER; note = 2'-O-methylcytidine-3'-phosphate
  modified_base 20: mod_base = OTHER; note = 2'-O-methyladenosine-3'-phosphate
  modified_base 21: mod_base = OTHER; note = 2'-O-methylguanosine-3'-phosphorothioate
  modified_base 22: mod_base = OTHER; note = 2'-O-methylguanosine-3'-phosphorothioate
  modified_base 23: mod_base = OTHER; note = 2'-O-methyluridine-3'-phosphate
caagttacaaaagcaaaacaggt

SEQ ID NO: 417 - RNA, 23 nt, synthetic construct
  source 1..23: mol_type = other RNA
  modified_base 1: mod_base = OTHER; note = 2'-O-methyluridine-3'-phosphorothioate
  modified_base 2: mod_base = OTHER; note = 2'-fluorouridine-3'-phosphorothioate
  modified_base 3: mod_base = OTHER; note = 2'-O-methylcytidine-3'-phosphate
  modified_base 4: mod_base = OTHER; note = 2'-O-methyladenosine-3'-phosphate
  modified_base 5: mod_base = OTHER; note = 2'-O-methyladenosine-3'-phosphate
  modified_base 6: mod_base = OTHER; note = 2'-O-methylguanosine-3'-phosphate
  modified_base 7: mod_base = OTHER; note = 2'-fluorouridine-3'-phosphate
  modified_base 8: mod_base = OTHER; note = 2'-O-methyluridine-3'-phosphate
  modified_base 9: mod_base = OTHER; note = 2'-O-methyladenosine-3'-phosphate
  modified_base 10: mod_base = OTHER; note = 2'-O-methylcytidine-3'-phosphate
  modified_base 11: mod_base = OTHER; note = 2'-O-methyladenosine-3'-phosphate
  modified_base 12: mod_base = OTHER; note = 2'-fluoroadenosine-3'-phosphate
  modified_base 13: mod_base = OTHER; note = 2'-O-methyladenosine-3'-phosphate
  modified_base 14: mod_base = OTHER; note = 2'-fluoroadenosine-3'-phosphate
  modified_base 15: mod_base = OTHER; note = 2'-O-methylguanosine-3'-phosphate
  modified_base 16: mod_base = OTHER; note = 2'-fluorocytidine-3'-phosphate
  modified_base 17: mod_base = OTHER; note = 2'-O-methyladenosine-3'-phosphate
  modified_base 18: mod_base = OTHER; note = 2'-O-methyladenosine-3'-phosphate
  modified_base 19: mod_base = OTHER; note = 2'-O-methyladenosine-3'-phosphate
  modified_base 20: mod_base = OTHER; note = 2'-O-methyladenosine-3'-phosphate
  modified_base 21: mod_base = OTHER; note = 2'-O-methylcytidine-3'-phosphorothioate
  modified_base 22: mod_base = OTHER; note = 2'-O-methyladenosine-3'-phosphorothioate
  modified_base 23: mod_base = OTHER; note = 2'-O-methylguanosine-3'-phosphate
ttcaagttacaaaagcaaaacag

SEQ ID NO: 418 - RNA, 23 nt, synthetic construct
  source 1..23: mol_type = other RNA
  modified_base 1: mod_base = OTHER; note = 2'-O-methyluridine-3'-phosphorothioate
  modified_base 2: mod_base = OTHER; note = 2'-fluorocytidine-3'-phosphorothioate
  modified_base 3: mod_base = OTHER; note = 2'-O-methyluridine-3'-phosphate
  modified_base 4: mod_base = OTHER; note = 2'-O-methyluridine-3'-phosphate
  modified_base 5: mod_base = OTHER; note = 2'-O-methylcytidine-3'-phosphate
  modified_base 6: mod_base = OTHER; note = 2'-O-methyladenosine-3'-phosphate
  modified_base 7: mod_base = OTHER; note = 2'-fluoroadenosine-3'-phosphate
  modified_base 8: mod_base = OTHER; note = 2'-O-methylguanosine-3'-phosphate
  modified_base 9: mod_base = OTHER; note = 2'-O-methyluridine-3'-phosphate
  modified_base 10: mod_base = OTHER; note = 2'-O-methyluridine-3'-phosphate
  modified_base 11: mod_base = OTHER; note = 2'-O-methyladenosine-3'-phosphate
  modified_base 12: mod_base = OTHER; note = 2'-fluorocytidine-3'-phosphate
  modified_base 13: mod_base = OTHER; note = 2'-O-methyladenosine-3'-phosphate
  modified_base 14: mod_base = OTHER; note = 2'-fluoroadenosine-3'-phosphate
  modified_base 15: mod_base = OTHER; note = 2'-O-methyladenosine-3'-phosphate
  modified_base 16: mod_base = OTHER; note = 2'-fluoroadenosine-3'-phosphate
  modified_base 17: mod_base = OTHER; note = 2'-O-methylguanosine-3'-phosphate
  modified_base 18: mod_base = OTHER; note = 2'-O-methylcytidine-3'-phosphate
  modified_base 19: mod_base = OTHER; note = 2'-O-methyladenosine-3'-phosphate
  modified_base 20: mod_base = OTHER; note = 2'-O-methyladenosine-3'-phosphate
  modified_base 21: mod_base = OTHER; note = 2'-O-methyladenosine-3'-phosphorothioate
  modified_base 22: mod_base = OTHER; note = 2'-O-methyladenosine-3'-phosphorothioate
  modified_base 23: mod_base = OTHER; note = 2'-O-methylcytidine-3'-phosphate
tcttcaagttacaaaagcaaaac

SEQ ID NO: 419 - RNA, 23 nt, synthetic construct
  source 1..23: mol_type = other RNA
  modified_base 1: mod_base = OTHER; note = 2'-O-methyladenosine-3'-phosphorothioate
  modified_base 2: mod_base = OTHER; note = 2'-fluorouridine-3'-phosphorothioate
  modified_base 3: mod_base = OTHER; note = 2'-O-methylcytidine-3'-phosphate
  modified_base 4: mod_base = OTHER; note = 2'-O-methyluridine-3'-phosphate
  modified_base 5: mod_base = OTHER; note = 2'-O-methyluridine-3'-phosphate
  modified_base 6: mod_base = OTHER; note = 2'-O-methylcytidine-3'-phosphate
  modified_base 7: mod_base = OTHER; note = 2'-fluoroadenosine-3'-phosphate
  modified_base 8: mod_base = OTHER; note = 2'-O-methyladenosine-3'-phosphate
  modified_base 9: mod_base = OTHER; note = 2'-O-methylguanosine-3'-phosphate
  modified_base 10: mod_base = OTHER; note = 2'-O-methyluridine-3'-phosphate
  modified_base 11: mod_base = OTHER; note = 2'-O-methyluridine-3'-phosphate
  modified_base 12: mod_base = OTHER; note = 2'-fluoroadenosine-3'-phosphate
  modified_base 13: mod_base = OTHER; note = 2'-O-methylcytidine-3'-phosphate
  modified_base 14: mod_base = OTHER; note = 2'-fluoroadenosine-3'-phosphate
  modified_base 15: mod_base = OTHER; note = 2'-O-methyladenosine-3'-phosphate
  modified_base 16: mod_base = OTHER; note = 2'-fluoroadenosine-3'-phosphate
  modified_base 17: mod_base = OTHER; note = 2'-O-methyladenosine-3'-phosphate
  modified_base 18: mod_base = OTHER; note = 2'-O-methylguanosine-3'-phosphate
  modified_base 19: mod_base = OTHER; note = 2'-O-methylcytidine-3'-phosphate
  modified_base 20: mod_base = OTHER; note = 2'-O-methyladenosine-3'-phosphate
  modified_base 21: mod_base = OTHER; note = 2'-O-methyladenosine-3'-phosphorothioate
  modified_base 22: mod_base = OTHER; note = 2'-O-methyladenosine-3'-phosphorothioate
  modified_base 23: mod_base = OTHER; note = 2'-O-methyladenosine-3'-phosphate
atcttcaagttacaaaagcaaaa

SEQ ID NO: 420 - RNA, 23 nt, synthetic construct
  source 1..23: mol_type = other RNA
  modified_base 1: mod_base = OTHER; note = 2'-O-methyladenosine-3'-phosphorothioate
  modified_base 2: mod_base = OTHER; note = 2'-fluoroadenosine-3'-phosphorothioate
  modified_base 3: mod_base = OTHER; note = 2'-O-methyluridine-3'-phosphate
  modified_base 4: mod_base = OTHER; note = 2'-O-methyladenosine-3'-phosphate
  modified_base 5: mod_base = OTHER; note = 2'-O-methyluridine-3'-phosphate
  modified_base 6: mod_base = OTHER; note = 2'-O-methylcytidine-3'-phosphate
  modified_base 7: mod_base = OTHER; note = 2'-fluorouridine-3'-phosphate
  modified_base 8: mod_base = OTHER; note = 2'-O-methyluridine-3'-phosphate
  modified_base 9: mod_base = OTHER; note = 2'-O-methylcytidine-3'-phosphate
  modified_base 10: mod_base = OTHER; note = 2'-O-methyladenosine-3'-phosphate
  modified_base 11: mod_base = OTHER; note = 2'-O-methyladenosine-3'-phosphate
  modified_base 12: mod_base = OTHER; note = 2'-fluoroguanosine-3'-phosphate
  modified_base 13: mod_base = OTHER; note = 2'-O-methyluridine-3'-phosphate
  modified_base 14: mod_base = OTHER; note = 2'-fluorouridine-3'-phosphate
  modified_base 15: mod_base = OTHER; note = 2'-O-methyladenosine-3'-phosphate
  modified_base 16: mod_base = OTHER; note = 2'-fluorocytidine-3'-phosphate
  modified_base 17: mod_base = OTHER; note = 2'-O-methyladenosine-3'-phosphate
  modified_base 18: mod_base = OTHER; note = 2'-O-methyladenosine-3'-phosphate
  modified_base 19: mod_base = OTHER; note = 2'-O-methyladenosine-3'-phosphate
  modified_base 20: mod_base = OTHER; note = 2'-O-methyladenosine-3'-phosphate
  modified_base 21: mod_base = OTHER; note = 2'-O-methylguanosine-3'-phosphorothioate
  modified_base 22: mod_base = OTHER; note = 2'-O-methylcytidine-3'-phosphorothioate
  modified_base 23: mod_base = OTHER; note = 2'-O-methyladenosine-3'-phosphate
aatatcttcaagttacaaaagca

SEQ ID NO: 421 - RNA, 23 nt, synthetic construct
  source 1..23: mol_type = other RNA
  modified_base 1: mod_base = OTHER; note = 2'-O-methyladenosine-3'-phosphorothioate
  modified_base 2: mod_base = OTHER; note = 2'-fluoroadenosine-3'-phosphorothioate
  modified_base 3: mod_base = OTHER; note = 2'-O-methyladenosine-3'-phosphate
  modified_base 4: mod_base = OTHER; note = 2'-O-methyluridine-3'-phosphate
  modified_base 5: mod_base = OTHER; note = 2'-O-methyladenosine-3'-phosphate
  modified_base 6: mod_base = OTHER; note = 2'-O-methyluridine-3'-phosphate
  modified_base 7: mod_base = OTHER; note = 2'-fluorocytidine-3'-phosphate
  modified_base 8: mod_base = OTHER; note = 2'-O-methyluridine-3'-phosphate
  modified_base 9: mod_base = OTHER; note = 2'-O-methyluridine-3'-phosphate
  modified_base 10: mod_base = OTHER; note = 2'-O-methylcytidine-3'-phosphate
  modified_base 11: mod_base = OTHER; note = 2'-O-methyladenosine-3'-phosphate
  modified_base 12: mod_base = OTHER; note = 2'-fluoroadenosine-3'-phosphate
  modified_base 13: mod_base = OTHER; note = 2'-O-methylguanosine-3'-phosphate
  modified_base 14: mod_base = OTHER; note = 2'-fluorouridine-3'-phosphate
  modified_base 15: mod_base = OTHER; note = 2'-O-methyluridine-3'-phosphate
  modified_base 16: mod_base = OTHER; note = 2'-fluoroadenosine-3'-phosphate
  modified_base 17: mod_base = OTHER; note = 2'-O-methylcytidine-3'-phosphate
  modified_base 18: mod_base = OTHER; note = 2'-O-methyladenosine-3'-phosphate
  modified_base 19: mod_base = OTHER; note = 2'-O-methyladenosine-3'-phosphate
  modified_base 20: mod_base = OTHER; note = 2'-O-methyladenosine-3'-phosphate
  modified_base 21: mod_base = OTHER; note = 2'-O-methyladenosine-3'-phosphorothioate
  modified_base 22: mod_base = OTHER; note = 2'-O-methylguanosine-3'-phosphorothioate
  modified_base 23: mod_base = OTHER; note = 2'-O-methylcytidine-3'-phosphate
aaatatcttcaagttacaaaagc

SEQ ID NO: 422 - RNA, 23 nt, synthetic construct
  source 1..23: mol_type = other RNA
  modified_base 1: mod_base = OTHER; note = 2'-O-methyluridine-3'-phosphorothioate
  modified_base 2: mod_base = OTHER; note = 2'-fluoroadenosine-3'-phosphorothioate
  modified_base 3: mod_base = OTHER; note = 2'-O-methyladenosine-3'-phosphate
  modified_base 4: mod_base = OTHER; note = 2'-O-methyladenosine-3'-phosphate
  modified_base 5: mod_base = OTHER; note = 2'-O-methyluridine-3'-phosphate
  modified_base 6: mod_base = OTHER; note = 2'-O-methyladenosine-3'-phosphate
  modified_base 7: mod_base = OTHER; note = 2'-fluorouridine-3'-phosphate
  modified_base 8: mod_base = OTHER; note = 2'-O-methylcytidine-3'-phosphate
  modified_base 9: mod_base = OTHER; note = 2'-O-methyluridine-3'-phosphate
  modified_base 10: mod_base = OTHER; note = 2'-O-methyluridine-3'-phosphate
  modified_base 11: mod_base = OTHER; note = 2'-O-methylcytidine-3'-phosphate
  modified_base 12: mod_base = OTHER; note = 2'-fluoroadenosine-3'-phosphate
  modified_base 13: mod_base = OTHER; note = 2'-O-methyladenosine-3'-phosphate
  modified_base 14: mod_base = OTHER; note = 2'-fluoroguanosine-3'-phosphate
  modified_base 15: mod_base = OTHER; note = 2'-O-methyluridine-3'-phosphate
  modified_base 16: mod_base = OTHER; note = 2'-fluorouridine-3'-phosphate
  modified_base 17: mod_base = OTHER; note = 2'-O-methyladenosine-3'-phosphate
  modified_base 18: mod_base = OTHER; note = 2'-O-methylcytidine-3'-phosphate
  modified_base 19: mod_base = OTHER; note = 2'-O-methyladenosine-3'-phosphate
  modified_base 20: mod_base = OTHER; note = 2'-O-methyladenosine-3'-phosphate
  modified_base 21: mod_base = OTHER; note = 2'-O-methyladenosine-3'-phosphorothioate
  modified_base 22: mod_base = OTHER; note = 2'-O-methyladenosine-3'-phosphorothioate
  modified_base 23: mod_base = OTHER; note = 2'-O-methylguanosine-3'-phosphate
taaatatcttcaagttacaaaag

SEQ ID NO: 423 - RNA, 23 nt, synthetic construct
  source 1..23: mol_type = other RNA
  modified_base 1: mod_base = OTHER; note = 2'-O-methyladenosine-3'-phosphorothioate
  modified_base 2: mod_base = OTHER; note = 2'-fluoroguanosine-3'-phosphorothioate
  modified_base 3: mod_base = OTHER; note = 2'-O-methyladenosine-3'-phosphate
  modified_base 4: mod_base = OTHER; note = 2'-O-methyladenosine-3'-phosphate
  modified_base 5: mod_base = OTHER; note = 2'-O-methyluridine-3'-phosphate
  modified_base 6: mod_base = OTHER; note = 2'-O-methyladenosine-3'-phosphate
  modified_base 7: mod_base = OTHER; note = 2'-fluoroadenosine-3'-phosphate
  modified_base 8: mod_base = OTHER; note = 2'-O-methyladenosine-3'-phosphate
  modified_base 9: mod_base = OTHER; note = 2'-O-methyluridine-3'-phosphate
  modified_base 10: mod_base = OTHER; note = 2'-O-methyladenosine-3'-phosphate
  modified_base 11: mod_base = OTHER; note = 2'-O-methyluridine-3'-phosphate
  modified_base 12: mod_base = OTHER; note = 2'-fluorocytidine-3'-phosphate
  modified_base 13: mod_base = OTHER; note = 2'-O-methyluridine-3'-phosphate
  modified_base 14: mod_base = OTHER; note = 2'-fluorouridine-3'-phosphate
  modified_base 15: mod_base = OTHER; note = 2'-O-methylcytidine-3'-phosphate
  modified_base 16: mod_base = OTHER; note = 2'-fluoroadenosine-3'-phosphate
  modified_base 17: mod_base = OTHER; note = 2'-O-methyladenosine-3'-phosphate
  modified_base 18: mod_base = OTHER; note = 2'-O-methylguanosine-3'-phosphate
  modified_base 19: mod_base = OTHER; note = 2'-O-methyluridine-3'-phosphate
  modified_base 20: mod_base = OTHER; note = 2'-O-methyluridine-3'-phosphate
  modified_base 21: mod_base = OTHER; note = 2'-O-methyladenosine-3'-phosphorothioate
  modified_base 22: mod_base = OTHER; note = 2'-O-methylcytidine-3'-phosphorothioate
  modified_base 23: mod_base = OTHER; note = 2'-O-methyladenosine-3'-phosphate
agaataaatatcttcaagttaca

SEQ ID NO: 424 - RNA, 23 nt, synthetic construct
  source 1..23: mol_type = other RNA
  modified_base 1: mod_base = OTHER; note = 2'-O-methylcytidine-3'-phosphorothioate
  modified_base 2: mod_base = OTHER; note = 2'-fluoroadenosine-3'-phosphorothioate
  modified_base 3: mod_base = OTHER; note = 2'-O-methylguanosine-3'-phosphate
  modified_base 4: mod_base = OTHER; note = 2'-O-methyladenosine-3'-phosphate
  modified_base 5: mod_base = OTHER; note = 2'-O-methyladenosine-3'-phosphate
  modified_base 6: mod_base = OTHER; note = 2'-O-methyluridine-3'-phosphate
  modified_base 7: mod_base = OTHER; note = 2'-fluoroadenosine-3'-phosphate
  modified_base 8: mod_base = OTHER; note = 2'-O-methyladenosine-3'-phosphate
  modified_base 9: mod_base = OTHER; note = 2'-O-methyladenosine-3'-phosphate
  modified_base 10: mod_base = OTHER; note = 2'-O-methyluridine-3'-phosphate
  modified_base 11: mod_base = OTHER; note = 2'-O-methyladenosine-3'-phosphate
  modified_base 12: mod_base = OTHER; note = 2'-fluorouridine-3'-phosphate
  modified_base 13: mod_base = OTHER; note = 2'-O-methylcytidine-3'-phosphate
  modified_base 14: mod_base = OTHER; note = 2'-fluorouridine-3'-phosphate
  modified_base 15: mod_base = OTHER; note = 2'-O-methyluridine-3'-phosphate
  modified_base 16: mod_base = OTHER; note = 2'-fluorocytidine-3'-phosphate
  modified_base 17: mod_base = OTHER; note = 2'-O-methyladenosine-3'-phosphate
  modified_base 18: mod_base = OTHER; note = 2'-O-methyladenosine-3'-phosphate
  modified_base 19: mod_base = OTHER; note = 2'-O-methylguanosine-3'-phosphate
  modified_base 20: mod_base = OTHER; note = 2'-O-methyluridine-3'-phosphate
  modified_base 21: mod_base = OTHER; note = 2'-O-methyluridine-3'-phosphorothioate
  modified_base 22: mod_base = OTHER; note = 2'-O-methyladenosine-3'-phosphorothioate
  modified_base 23: mod_base = OTHER; note = 2'-O-methylcytidine-3'-phosphate
cagaataaatatcttcaagttac

SEQ ID NO: 425 - RNA, 23 nt, synthetic construct
  source 1..23: mol_type = other RNA
  modified_base 1: mod_base = OTHER; note = 2'-O-methyladenosine-3'-phosphorothioate
  modified_base 2: mod_base = OTHER; note = 2'-fluoroadenosine-3'-phosphorothioate
  modified_base 3: mod_base = OTHER; note = 2'-O-methyladenosine-3'-phosphate
  modified_base 4: mod_base = OTHER; note = 2'-O-methyladenosine-3'-phosphate
  modified_base 5: mod_base = OTHER; note = 2'-O-methylcytidine-3'-phosphate
  modified_base 6: mod_base = OTHER; note = 2'-O-methylcytidine-3'-phosphate
  modified_base 7: mod_base = OTHER; note = 2'-fluorocytidine-3'-phosphate
  modified_base 8: mod_base = OTHER; note = 2'-O-methyladenosine-3'-phosphate
  modified_base 9: mod_base = OTHER; note = 2'-O-methylguanosine-3'-phosphate
  modified_base 10: mod_base = OTHER; note = 2'-O-methyladenosine-3'-phosphate
  modified_base 11: mod_base = OTHER; note = 2'-O-methyladenosine-3'-phosphate
  modified_base 12: mod_base = OTHER; note = 2'-fluorouridine-3'-phosphate
  modified_base 13: mod_base = OTHER; note = 2'-O-methyladenosine-3'-phosphate
  modified_base 14: mod_base = OTHER; note = 2'-fluoroadenosine-3'-phosphate
  modified_base 15: mod_base = OTHER; note = 2'-O-methyladenosine-3'-phosphate
  modified_base 16: mod_base = OTHER; note = 2'-fluorouridine-3'-phosphate
  modified_base 17: mod_base = OTHER; note = 2'-O-methyladenosine-3'-phosphate
  modified_base 18: mod_base = OTHER; note = 2'-O-methyluridine-3'-phosphate
  modified_base 19: mod_base = OTHER; note = 2'-O-methylcytidine-3'-phosphate
  modified_base 20: mod_base = OTHER; note = 2'-O-methyluridine-3'-phosphate
  modified_base 21: mod_base = OTHER; note = 2'-O-methyluridine-3'-phosphorothioate
  modified_base 22: mod_base = OTHER; note = 2'-O-methylcytidine-3'-phosphorothioate
  modified_base 23: mod_base = OTHER; note = 2'-O-methyladenosine-3'-phosphate
aaaacccagaataaatatcttca

SEQ ID NO: 426 - RNA, 23 nt, synthetic construct
  source 1..23: mol_type = other RNA
  modified_base 1: mod_base = OTHER; note = 2'-O-methylcytidine-3'-phosphorothioate
  modified_base 2: mod_base = OTHER; note = 2'-fluoroadenosine-3'-phosphorothioate
  modified_base 3: mod_base = OTHER; note = 2'-O-methyladenosine-3'-phosphate
  modified_base 4: mod_base = OTHER; note = 2'-O-methyladenosine-3'-phosphate
  modified_base 5: mod_base = OTHER; note = 2'-O-methyladenosine-3'-phosphate
  modified_base 6: mod_base = OTHER; note = 2'-O-methylcytidine-3'-phosphate
  modified_base 7: mod_base = OTHER; note = 2'-fluorocytidine-3'-phosphate
  modified_base 8: mod_base = OTHER; note = 2'-O-methylcytidine-3'-phosphate
  modified_base 9: mod_base = OTHER; note = 2'-O-methyladenosine-3'-phosphate
  modified_base 10: mod_base = OTHER; note = 2'-O-methylguanosine-3'-phosphate
  modified_base 11: mod_base = OTHER; note = 2'-O-methyladenosine-3'-phosphate
  modified_base 12: mod_base = OTHER; note = 2'-fluoroadenosine-3'-phosphate
  modified_base 13: mod_base = OTHER; note = 2'-O-methyluridine-3'-phosphate
  modified_base 14: mod_base = OTHER; note = 2'-fluoroadenosine-3'-phosphate
  modified_base 15: mod_base = OTHER; note = 2'-O-methyladenosine-3'-phosphate
  modified_base 16: mod_base = OTHER; note = 2'-fluoroadenosine-3'-phosphate
  modified_base 17: mod_base = OTHER; note = 2'-O-methyluridine-3'-phosphate
  modified_base 18: mod_base = OTHER; note = 2'-O-methyladenosine-3'-phosphate
  modified_base 19: mod_base = OTHER; note = 2'-O-methyluridine-3'-phosphate
  modified_base 20: mod_base = OTHER; note = 2'-O-methylcytidine-3'-phosphate
  modified_base 21: mod_base = OTHER; note = 2'-O-methyluridine-3'-phosphorothioate
  modified_base 22: mod_base = OTHER; note = 2'-O-methyluridine-3'-phosphorothioate
  modified_base 23: mod_base = OTHER; note = 2'-O-methylcytidine-3'-phosphate
caaaacccagaataaatatcttc

SEQ ID NO: 427 - RNA, 23 nt, synthetic construct
  source 1..23: mol_type = other RNA
  modified_base 1: mod_base = OTHER; note = 2'-O-methyluridine-3'-phosphorothioate
  modified_base 2: mod_base = OTHER; note = 2'-fluoroadenosine-3'-phosphorothioate
  modified_base 3: mod_base = OTHER; note = 2'-O-methylcytidine-3'-phosphate
  modified_base 4: mod_base = OTHER; note = 2'-O-methyladenosine-3'-phosphate
  modified_base 5: mod_base = OTHER; note = 2'-O-methyladenosine-3'-phosphate
  modified_base 6: mod_base = OTHER; note = 2'-O-methyladenosine-3'-phosphate
  modified_base 7: mod_base = OTHER; note = 2'-fluoroadenosine-3'-phosphate
  modified_base 8: mod_base = OTHER; note = 2'-O-methylcytidine-3'-phosphate
  modified_base 9: mod_base = OTHER; note = 2'-O-methylcytidine-3'-phosphate
  modified_base 10: mod_base = OTHER; note = 2'-O-methylcytidine-3'-phosphate
  modified_base 11: mod_base = OTHER; note = 2'-O-methyladenosine-3'-phosphate
  modified_base 12: mod_base = OTHER; note = 2'-fluoroguanosine-3'-phosphate
  modified_base 13: mod_base = OTHER; note = 2'-O-methyladenosine-3'-phosphate
  modified_base 14: mod_base = OTHER; note = 2'-fluoroadenosine-3'-phosphate
  modified_base 15: mod_base = OTHER; note = 2'-O-methyluridine-3'-phosphate
  modified_base 16: mod_base = OTHER; note = 2'-fluoroadenosine-3'-phosphate
  modified_base 17: mod_base = OTHER; note = 2'-O-methyladenosine-3'-phosphate
  modified_base 18: mod_base = OTHER; note = 2'-O-methyladenosine-3'-phosphate
  modified_base 19: mod_base = OTHER; note = 2'-O-methyluridine-3'-phosphate
  modified_base 20: mod_base = OTHER; note = 2'-O-methyladenosine-3'-phosphate
  modified_base 21: mod_base = OTHER; note = 2'-O-methyluridine-3'-phosphorothioate
  modified_base 22: mod_base = OTHER; note = 2'-O-methylcytidine-3'-phosphorothioate
  modified_base 23: mod_base = OTHER; note = 2'-O-methyluridine-3'-phosphate
tacaaaacccagaataaatatct

SEQ ID NO: 428 - RNA, 23 nt, synthetic construct
  source 1..23: mol_type = other RNA
  modified_base 1: mod_base = OTHER; note = 2'-O-methylcytidine-3'-phosphorothioate
  modified_base 2: mod_base = OTHER; note = 2'-fluorouridine-3'-phosphorothioate
  modified_base 3: mod_base = OTHER; note = 2'-O-methyladenosine-3'-phosphate
  modified_base 4: mod_base = OTHER; note = 2'-O-methylcytidine-3'-phosphate
  modified_base 5: mod_base = OTHER; note = 2'-O-methyladenosine-3'-phosphate
  modified_base 6: mod_base = OTHER; note = 2'-O-methyladenosine-3'-phosphate
  modified_base 7: mod_base = OTHER; note = 2'-fluoroadenosine-3'-phosphate
  modified_base 8: mod_base = OTHER; note = 2'-O-methyladenosine-3'-phosphate
  modified_base 9: mod_base = OTHER; note = 2'-O-methylcytidine-3'-phosphate
  modified_base 10: mod_base = OTHER; note = 2'-O-methylcytidine-3'-phosphate
  modified_base 11: mod_base = OTHER; note = 2'-O-methylcytidine-3'-phosphate
  modified_base 12: mod_base = OTHER; note = 2'-fluoroadenosine-3'-phosphate
  modified_base 13: mod_base = OTHER; note = 2'-O-methylguanosine-3'-phosphate
  modified_base 14: mod_base = OTHER; note = 2'-fluoroadenosine-3'-phosphate
  modified_base 15: mod_base = OTHER; note = 2'-O-methyladenosine-3'-phosphate
  modified_base 16: mod_base = OTHER; note = 2'-fluorouridine-3'-phosphate
  modified_base 17: mod_base = OTHER; note = 2'-O-methyladenosine-3'-phosphate
  modified_base 18: mod_base = OTHER; note = 2'-O-methyladenosine-3'-phosphate
  modified_base 19: mod_base = OTHER; note = 2'-O-methyladenosine-3'-phosphate
  modified_base 20: mod_base = OTHER; note = 2'-O-methyluridine-3'-phosphate
  modified_base 21: mod_base = OTHER; note = 2'-O-methyladenosine-3'-phosphorothioate
  modified_base 22: mod_base = OTHER; note = 2'-O-methyluridine-3'-phosphorothioate
  modified_base 23: mod_base = OTHER; note = 2'-O-methylcytidine-3'-phosphate
ctacaaaacccagaataaatatc

SEQ ID NO: 429 - RNA, 23 nt, synthetic construct
  source 1..23: mol_type = other RNA
  modified_base 1: mod_base = OTHER; note = 2'-O-methyladenosine-3'-phosphorothioate
  modified_base 2: mod_base = OTHER; note = 2'-fluoroadenosine-3'-phosphorothioate
  modified_base 3: mod_base = OTHER; note = 2'-O-methyladenosine-3'-phosphate
  modified_base 4: mod_base = OTHER; note = 2'-O-methyladenosine-3'-phosphate
  modified_base 5: mod_base = OTHER; note = 2'-O-methyluridine-3'-phosphate
  modified_base 6: mod_base = OTHER; note = 2'-O-methylguanosine-3'-phosphate
  modified_base 7: mod_base = OTHER; note = 2'-fluorocytidine-3'-phosphate
  modified_base 8: mod_base = OTHER; note = 2'-O-methyluridine-3'-phosphate
  modified_base 9: mod_base = OTHER; note = 2'-O-methyladenosine-3'-phosphate
  modified_base 10: mod_base = OTHER; note = 2'-O-methylcytidine-3'-phosphate
  modified_base 11: mod_base = OTHER; note = 2'-O-methyladenosine-3'-phosphate
  modified_base 12: mod_base = OTHER; note = 2'-fluoroadenosine-3'-phosphate
  modified_base 13: mod_base = OTHER; note = 2'-O-methyladenosine-3'-phosphate
  modified_base 14: mod_base = OTHER; note = 2'-fluoroadenosine-3'-phosphate
  modified_base 15: mod_base = OTHER; note = 2'-O-methylcytidine-3'-phosphate
  modified_base 16: mod_base = OTHER; note = 2'-fluorocytidine-3'-phosphate
  modified_base 17: mod_base = OTHER; note = 2'-O-methylcytidine-3'-phosphate
  modified_base 18: mod_base = OTHER; note = 2'-O-methyladenosine-3'-phosphate
  modified_base 19: mod_base = OTHER; note = 2'-O-methylguanosine-3'-phosphate
  modified_base 20: mod_base = OTHER; note = 2'-O-methyladenosine-3'-phosphate
  modified_base 21: mod_base = OTHER; note = 2'-O-methyladenosine-3'-phosphorothioate
  modified_base 22: mod_base = OTHER; note = 2'-O-methyluridine-3'-phosphorothioate
  modified_base 23: mod_base = OTHER; note = 2'-O-methyladenosine-3'-phosphate
aaaatgctacaaaacccagaata

SEQ ID NO: 430 - RNA, 23 nt, synthetic construct
  source 1..23: mol_type = other RNA
  modified_base 1: mod_base = OTHER; note = 2'-O-methyluridine-3'-phosphorothioate
  modified_base 2: mod_base = OTHER; note = 2'-fluoroadenosine-3'-phosphorothioate
  modified_base 3: mod_base = OTHER; note = 2'-O-methyladenosine-3'-phosphate
  modified_base 4: mod_base = OTHER; note = 2'-O-methyluridine-3'-phosphate
  modified_base 5: mod_base = OTHER; note = 2'-O-methyladenosine-3'-phosphate
  modified_base 6: mod_base = OTHER; note = 2'-O-methyladenosine-3'-phosphate
  modified_base 7: mod_base = OTHER; note = 2'-fluoroadenosine-3'-phosphate
  modified_base 8: mod_base = OTHER; note = 2'-O-methyladenosine-3'-phosphate
  modified_base 9: mod_base = OTHER; note = 2'-O-methyladenosine-3'-phosphate
  modified_base 10: mod_base = OTHER; note = 2'-O-methyluridine-3'-phosphate
  modified_base 11: mod_base = OTHER; note = 2'-O-methylguanosine-3'-phosphate
  modified_base 12: mod_base = OTHER; note = 2'-fluorocytidine-3'-phosphate
  modified_base 13: mod_base = OTHER; note = 2'-O-methyluridine-3'-phosphate
  modified_base 14: mod_base = OTHER; note = 2'-fluoroadenosine-3'-phosphate
  modified_base 15: mod_base = OTHER; note = 2'-O-methylcytidine-3'-phosphate
  modified_base 16: mod_base = OTHER; note = 2'-fluoroadenosine-3'-phosphate
  modified_base 17: mod_base = OTHER; note = 2'-O-methyladenosine-3'-phosphate
  modified_base 18: mod_base = OTHER; note = 2'-O-methyladenosine-3'-phosphate
  modified_base 19: mod_base = OTHER; note = 2'-O-methyladenosine-3'-phosphate
  modified_base 20: mod_base = OTHER; note = 2'-O-methylcytidine-3'-phosphate
  modified_base 21: mod_base = OTHER; note = 2'-O-methylcytidine-3'-phosphorothioate
  modified_base 22: mod_base = OTHER; note = 2'-O-methylcytidine-3'-phosphorothioate
  modified_base 23: mod_base = OTHER; note = 2'-O-methyladenosine-3'-phosphate
taataaaaatgctacaaaaccca

SEQ ID NO: 431 - RNA, 23 nt, synthetic construct
  source 1..23: mol_type = other RNA
  modified_base 1: mod_base = OTHER; note = 2'-O-methyluridine-3'-phosphorothioate
  modified_base 2: mod_base = OTHER; note = 2'-fluorouridine-3'-phosphorothioate
  modified_base 3: mod_base = OTHER; note = 2'-O-methyladenosine-3'-phosphate
  modified_base 4: mod_base = OTHER; note = 2'-O-methyladenosine-3'-phosphate
  modified_base 5: mod_base = OTHER; note = 2'-O-methyluridine-3'-phosphate
  modified_base 6: mod_base = OTHER; note = 2'-O-methyladenosine-3'-phosphate
  modified_base 7: mod_base = OTHER; note = 2'-fluoroadenosine-3'-phosphate
  modified_base 8: mod_base = OTHER; note = 2'-O-methyladenosine-3'-phosphate
  modified_base 9: mod_base = OTHER; note = 2'-O-methyladenosine-3'-phosphate
  modified_base 10: mod_base = OTHER; note = 2'-O-methyladenosine-3'-phosphate
  modified_base 11: mod_base = OTHER; note = 2'-O-methyluridine-3'-phosphate
  modified_base 12: mod_base = OTHER; note = 2'-fluoroguanosine-3'-phosphate
  modified_base 13: mod_base = OTHER; note = 2'-O-methylcytidine-3'-phosphate
  modified_base 14: mod_base = OTHER; note = 2'-fluorouridine-3'-phosphate
  modified_base 15: mod_base = OTHER; note = 2'-O-methyladenosine-3'-phosphate
  modified_base 16: mod_base = OTHER; note = 2'-fluorocytidine-3'-phosphate
  modified_base 17: mod_base = OTHER; note = 2'-O-methyladenosine-3'-phosphate
  modified_base 18: mod_base = OTHER; note = 2'-O-methyladenosine-3'-phosphate
  modified_base 19: mod_base = OTHER; note = 2'-O-methyladenosine-3'-phosphate
  modified_base 20: mod_base = OTHER; note = 2'-O-methyladenosine-3'-phosphate
  modified_base 21: mod_base = OTHER; note = 2'-O-methylcytidine-3'-phosphorothioate
  modified_base 22: mod_base = OTHER; note = 2'-O-methylcytidine-3'-phosphorothioate
  modified_base 23: mod_base = OTHER; note = 2'-O-methylcytidine-3'-phosphate
ttaataaaaatgctacaaaaccc

SEQ ID NO: 432 - RNA, 23 nt, synthetic construct
  source 1..23: mol_type = other RNA
  modified_base 1: mod_base = OTHER; note = 2'-O-methyladenosine-3'-phosphorothioate
  modified_base 2: mod_base = OTHER; note = 2'-fluorouridine-3'-phosphorothioate
  modified_base 3: mod_base = OTHER; note = 2'-O-methyluridine-3'-phosphate
  modified_base 4: mod_base = OTHER; note = 2'-O-methyladenosine-3'-phosphate
  modified_base 5: mod_base = OTHER; note = 2'-O-methyladenosine-3'-phosphate
  modified_base 6: mod_base = OTHER; note = 2'-O-methyluridine-3'-phosphate
  modified_base 7: mod_base = OTHER; note = 2'-fluoroadenosine-3'-phosphate
  modified_base 8: mod_base = OTHER; note = 2'-O-methyladenosine-3'-phosphate
  modified_base 9: mod_base = OTHER; note = 2'-O-methyladenosine-3'-phosphate
  modified_base 10: mod_base = OTHER; note = 2'-O-methyladenosine-3'-phosphate
  modified_base 11: mod_base = OTHER; note = 2'-O-methyladenosine-3'-phosphate
  modified_base 12: mod_base = OTHER; note = 2'-fluorouridine-3'-phosphate
  modified_base 13: mod_base = OTHER; note = 2'-O-methylguanosine-3'-phosphate
  modified_base 14: mod_base = OTHER; note = 2'-fluorocytidine-3'-phosphate
  modified_base 15: mod_base = OTHER; note = 2'-O-methyluridine-3'-phosphate
  modified_base 16: mod_base = OTHER; note = 2'-fluoroadenosine-3'-phosphate
  modified_base 17: mod_base = OTHER; note = 2'-O-methylcytidine-3'-phosphate
  modified_base 18: mod_base = OTHER; note = 2'-O-methyladenosine-3'-phosphate
  modified_base 19: mod_base = OTHER; note = 2'-O-methyladenosine-3'-phosphate
  modified_base 20: mod_base = OTHER; note = 2'-O-methyladenosine-3'-phosphate
  modified_base 21: mod_base = OTHER; note = 2'-O-methyladenosine-3'-phosphorothioate
  modified_base 22: mod_base = OTHER; note = 2'-O-methylcytidine-3'-phosphorothioate
  modified_base 23: mod_base = OTHER; note = 2'-O-methylcytidine-3'-phosphate
attaataaaaatgctacaaaacc

SEQ ID NO: 433 - RNA, 23 nt, synthetic construct
  source 1..23: mol_type = other RNA
  modified_base 1: mod_base = OTHER; note = 2'-O-methyladenosine-3'-phosphorothioate
  modified_base 2: mod_base = OTHER; note = 2'-fluoroguanosine-3'-phosphorothioate
  modified_base 3: mod_base = OTHER; note = 2'-O-methyluridine-3'-phosphate
  modified_base 4: mod_base = OTHER; note = 2'-O-methylcytidine-3'-phosphate
  modified_base 5: mod_base = OTHER; note = 2'-O-methyladenosine-3'-phosphate
  modified_base 6: mod_base = OTHER; note = 2'-O-methylcytidine-3'-phosphate
  modified_base 7: mod_base = OTHER; note = 2'-fluorocytidine-3'-phosphate
  modified_base 8: mod_base = OTHER; note = 2'-O-methyladenosine-3'-phosphate
  modified_base 9: mod_base = OTHER; note = 2'-O-methyluridine-3'-phosphate
  modified_base 10: mod_base = OTHER; note = 2'-O-methyladenosine-3'-phosphate
  modified_base 11: mod_base = OTHER; note = 2'-O-methyluridine-3'-phosphate
  modified_base 12: mod_base = OTHER; note = 2'-fluorouridine-3'-phosphate
  modified_base 13: mod_base = OTHER; note = 2'-O-methyladenosine-3'-phosphate
  modified_base 14: mod_base = OTHER; note = 2'-fluoroadenosine-3'-phosphate
  modified_base 15: mod_base = OTHER; note = 2'-O-methyluridine-3'-phosphate
  modified_base 16: mod_base = OTHER; note = 2'-fluoroadenosine-3'-phosphate
  modified_base 17: mod_base = OTHER; note = 2'-O-methyladenosine-3'-phosphate
  modified_base 18: mod_base = OTHER; note = 2'-O-methyladenosine-3'-phosphate
  modified_base 19: mod_base = OTHER; note = 2'-O-methyladenosine-3'-phosphate
  modified_base 20: mod_base = OTHER; note = 2'-O-methyladenosine-3'-phosphate
  modified_base 21: mod_base = OTHER; note = 2'-O-methyluridine-3'-phosphorothioate
  modified_base 22: mod_base = OTHER; note = 2'-O-methylguanosine-3'-phosphorothioate
  modified_base 23: mod_base = OTHER; note = 2'-O-methylcytidine-3'-phosphate
agtcaccatattaataaaaatgc

SEQ ID NO: 434 - RNA, 23 nt, synthetic construct
  source 1..23: mol_type = other RNA
  modified_base 1: mod_base = OTHER; note = 2'-O-methyladenosine-3'-phosphorothioate
  modified_base 2: mod_base = OTHER; note = 2'-fluoroadenosine-3'-phosphorothioate
  modified_base 3: mod_base = OTHER; note = 2'-O-methylguanosine-3'-phosphate
  modified_base 4: mod_base = OTHER; note = 2'-O-methyluridine-3'-phosphate
  modified_base 5: mod_base = OTHER; note = 2'-O-methylcytidine-3'-phosphate
  modified_base 6: mod_base = OTHER; note = 2'-O-methyladenosine-3'-phosphate
  modified_base 7: mod_base = OTHER; note = 2'-fluorocytidine-3'-phosphate
  modified_base 8: mod_base = OTHER; note = 2'-O-methylcytidine-3'-phosphate
  modified_base 9: mod_base = OTHER; note = 2'-O-methyladenosine-3'-phosphate
  modified_base 10: mod_base = OTHER; note = 2'-O-methyluridine-3'-phosphate
  modified_base 11: mod_base = OTHER; note = 2'-O-methyladenosine-3'-phosphate
  modified_base 12: mod_base = OTHER; note = 2'-fluorouridine-3'-phosphate
  modified_base 13: mod_base = OTHER; note = 2'-O-methyluridine-3'-phosphate
  modified_base 14: mod_base = OTHER; note = 2'-fluoroadenosine-3'-phosphate
  modified_base 15: mod_base = OTHER; note = 2'-O-methyladenosine-3'-phosphate
  modified_base 16: mod_base = OTHER; note = 2'-fluorouridine-3'-phosphate
  modified_base 17: mod_base = OTHER; note = 2'-O-methyladenosine-3'-phosphate
  modified_base 18: mod_base = OTHER; note = 2'-O-methyladenosine-3'-phosphate
  modified_base 19: mod_base = OTHER; note = 2'-O-methyladenosine-3'-phosphate
  modified_base 20: mod_base = OTHER; note = 2'-O-methyladenosine-3'-phosphate
  modified_base 21: mod_base = OTHER; note = 2'-O-methyladenosine-3'-phosphorothioate
  modified_base 22: mod_base = OTHER; note = 2'-O-methyluridine-3'-phosphorothioate
  modified_base 23: mod_base = OTHER; note = 2'-O-methylguanosine-3'-phosphate
aagtcaccatattaataaaaatg

SEQ ID NO: 435 - RNA, 23 nt, synthetic construct
  source 1..23: mol_type = other RNA
  modified_base 1: mod_base = OTHER; note = 2'-O-methylcytidine-3'-phosphorothioate
  modified_base 2: mod_base = OTHER; note = 2'-fluorouridine-3'-phosphorothioate
  modified_base 3: mod_base = OTHER; note = 2'-O-methyluridine-3'-phosphate
  modified_base 4: mod_base = OTHER; note = 2'-O-methylcytidine-3'-phosphate
  modified_base 5: mod_base = OTHER; note = 2'-O-methyladenosine-3'-phosphate
  modified_base 6: mod_base = OTHER; note = 2'-O-methyladenosine-3'-phosphate
  modified_base 7: mod_base = OTHER; note = 2'-fluoroguanosine-3'-phosphate
  modified_base 8: mod_base = OTHER; note = 2'-O-methyluridine-3'-phosphate
  modified_base 9: mod_base = OTHER; note = 2'-O-methyluridine-3'-phosphate
  modified_base 10: mod_base = OTHER; note = 2'-O-methyladenosine-3'-phosphate
  modified_base 11: mod_base = OTHER; note = 2'-O-methylcytidine-3'-phosphate
  modified_base 12: mod_base = OTHER; note = 2'-fluoroadenosine-3'-phosphate
  modified_base 13: mod_base = OTHER; note = 2'-O-methyladenosine-3'-phosphate
  modified_base 14: mod_base = OTHER; note = 2'-fluoroadenosine-3'-phosphate
  modified_base 15: mod_base = OTHER; note = 2'-O-methyladenosine-3'-phosphate
  modified_base 16: mod_base = OTHER; note = 2'-fluoroguanosine-3'-phosphate
  modified_base 17: mod_base = OTHER; note = 2'-O-methylcytidine-3'-phosphate
  modified_base 18: mod_base = OTHER; note = 2'-O-methyladenosine-3'-phosphate
  modified_base 19: mod_base = OTHER; note = 2'-O-methyladenosine-3'-phosphate
  modified_base 20: mod_base = OTHER; note = 2'-O-methyladenosine-3'-phosphate
  modified_base 21: mod_base = OTHER; note = 2'-O-methyladenosine-3'-phosphorothioate
  modified_base 22: mod_base = OTHER; note = 2'-O-methylcytidine-3'-phosphorothioate
  modified_base 23: mod_base = OTHER; note = 2'-O-methyladenosine-3'-phosphate
cttcaagttacaaaagcaaaaca

SEQ ID NO: 436 - RNA, 23 nt, synthetic construct
  source 1..23: mol_type = other RNA
  modified_base 1: mod_base = OTHER; note = 2'-O-methyladenosine-3'-phosphorothioate
  modified_base 2: mod_base = OTHER; note = 2'-fluorouridine-3'-phosphorothioate
  modified_base 3: mod_base = OTHER; note = 2'-O-methyladenosine-3'-phosphate
  modified_base 4: mod_base = OTHER; note = 2'-O-methyluridine-3'-phosphate
  modified_base 5: mod_base = OTHER; note = 2'-O-methyluridine-3'-phosphate
  modified_base 6: mod_base = OTHER; note = 2'-O-methyladenosine-3'-phosphate
  modified_base 7: mod_base = OTHER; note = 2'-fluoroadenosine-3'-phosphate
  modified_base 8: mod_base = OTHER; note = 2'-O-methyluridine-3'-phosphate
  modified_base 9: mod_base = OTHER; note = 2'-O-methyladenosine-3'-phosphate
  modified_base 10: mod_base = OTHER; note = 2'-O-methyladenosine-3'-phosphate
  modified_base 11: mod_base = OTHER; note = 2'-O-methyladenosine-3'-phosphate
  modified_base 12: mod_base = OTHER; note = 2'-fluoroadenosine-3'-phosphate
  modified_base 13: mod_base = OTHER; note = 2'-O-methyladenosine-3'-phosphate
  modified_base 14: mod_base = OTHER; note = 2'-fluorouridine-3'-phosphate
  modified_base 15: mod_base = OTHER; note = 2'-O-methylguanosine-3'-phosphate
  modified_base 16: mod_base = OTHER; note = 2'-fluorocytidine-3'-phosphate
  modified_base 17: mod_base = OTHER; note = 2'-O-methyluridine-3'-phosphate
  modified_base 18: mod_base = OTHER; note = 2'-O-methyladenosine-3'-phosphate
  modified_base 19: mod_base = OTHER; note = 2'-O-methylcytidine-3'-phosphate
  modified_base 20: mod_base = OTHER; note = 2'-O-methyladenosine-3'-phosphate
  modified_base 21: mod_base = OTHER; note = 2'-O-methyladenosine-3'-phosphorothioate
  modified_base 22: mod_base = OTHER; note = 2'-O-methyladenosine-3'-phosphorothioate
  modified_base 23: mod_base = OTHER; note = 2'-O-methyladenosine-3'-phosphate
atattaataaaaatgctacaaaa

SEQ ID NO: 437 - RNA, 21 nt, synthetic construct
  source 1..21: mol_type = other RNA
cctcaccaagatcctgcatgt

SEQ ID NO: 438 - RNA, 21 nt, synthetic construct
  source 1..21: mol_type = other RNA
caccaagatcctgcatgtctt

SEQ ID NO: 439 - RNA, 21 nt, synthetic construct
  source 1..21: mol_type = other RNA
caagatcctgcatgtcttcca

SEQ ID NO: 440 - RNA, 21 nt, synthetic construct
  source 1..21: mol_type = other RNA
tcctggcttcctggtgaagat

SEQ ID NO: 441 - RNA, 21 nt, synthetic construct
  source 1..21: mol_type = other RNA
ctggcttcctggtgaagatga

SEQ ID NO: 442 - RNA, 21 nt, synthetic construct
  source 1..21: mol_type = other RNA
ggcttcctggtgaagatgagt

SEQ ID NO: 443 - RNA, 21 nt, synthetic construct
  source 1..21: mol_type = other RNA
gcttcctggtgaagatgagtg

SEQ ID NO: 444 - RNA, 21 nt, synthetic construct
  source 1..21: mol_type = other RNA
tggagctggccttgaagttgc

SEQ ID NO: 445 - RNA, 21 nt, synthetic construct
  source 1..21: mol_type = other RNA
agttgccccatgtcgactaca

SEQ ID NO: 446 - RNA, 21 nt, synthetic construct
  source 1..21: mol_type = other RNA
tgccccatgtcgactacatcg

SEQ ID NO: 447 - RNA, 21 nt, synthetic construct
  source 1..21: mol_type = other RNA
cggtaccgggcggatgaatac

SEQ ID NO: 448 - RNA, 21 nt, synthetic construct
  source 1..21: mol_type = other RNA
ggtaccgggcggatgaatacc

SEQ ID NO: 449 - RNA, 21 nt, synthetic construct
  source 1..21: mol_type = other RNA
ggcagcctggtggaggtgtat

SEQ ID NO: 450 - RNA, 21 nt, synthetic construct
  source 1..21: mol_type = other RNA
cagcctggtggaggtgtatct

SEQ ID NO: 451 - RNA, 21 nt, synthetic construct
  source 1..21: mol_type = other RNA
agcctggtggaggtgtatctc

SEQ ID NO: 452 - RNA, 21 nt, synthetic construct
  source 1..21: mol_type = other RNA
gcctggtggaggtgtatctcc

SEQ ID NO: 453 - RNA, 21 nt, synthetic construct
  source 1..21: mol_type = other RNA
gtatctcctagacaccagcat

SEQ ID NO: 454 - RNA, 21 nt, synthetic construct
  source 1..21: mol_type = other RNA
atctcctagacaccagcatac

SEQ ID NO: 455 - RNA, 21 nt, synthetic construct
  source 1..21: mol_type = other RNA
tcctagacaccagcatacaga

SEQ ID NO: 456 - RNA, 21 nt, synthetic construct
  source 1..21: mol_type = other RNA
ctagacaccagcatacagagt

SEQ ID NO: 457 - RNA, 21 nt, synthetic construct
  source 1..21: mol_type = other RNA
atggtcaccgacttcgagaat

SEQ ID NO: 458 - RNA, 21 nt, synthetic construct
  source 1..21: mol_type = other RNA
tcaccgacttcgagaatgtgc

SEQ ID NO: 459 - RNA, 21 nt, synthetic construct
  source 1..21: mol_type = other RNA
cctcataggcctggagtttat

SEQ ID NO: 460 - RNA, 21 nt, synthetic construct
  source 1..21: mol_type = other RNA
ggcctggagtttattcggaaa

SEQ ID NO: 461 - RNA, 21 nt, synthetic construct
  source 1..21: mol_type = other RNA
gcctggagtttattcggaaaa

SEQ ID NO: 462 - RNA, 21 nt, synthetic construct
  source 1..21: mol_type = other RNA
ttgtgtcacagagtgggacat

SEQ ID NO: 463 - RNA, 21 nt, synthetic construct
  source 1..21: mol_type = other RNA
ctgatccacttctctgccaaa

SEQ ID NO: 464 - RNA, 21 nt, synthetic construct
  source 1..21: mol_type = other RNA
atccacttctctgccaaagat

SEQ ID NO: 465 - RNA, 21 nt, synthetic construct
  source 1..21: mol_type = other RNA
tctctgccaaagatgtcatca

SEQ ID NO: 466 - RNA, 21 nt, synthetic construct
  source 1..21: mol_type = other RNA
tgtcatcaatgaggcctggtt

SEQ ID NO: 467 - RNA, 21 nt, synthetic construct
  source 1..21: mol_type = other RNA
agctgttttgcaggactgtat

SEQ ID NO: 468 - RNA, 21 nt, synthetic construct
  source 1..21: mol_type = other RNA
ctgttttgcaggactgtatgg

SEQ ID NO: 469 - RNA, 21 nt, synthetic construct
  source 1..21: mol_type = other RNA
ggactgtatggtcagcacact

SEQ ID NO: 470 - RNA, 21 nt, synthetic construct
  source 1..21: mol_type = other RNA
actgtatggtcagcacactcg

SEQ ID NO: 471 - RNA, 21 nt, synthetic construct
  source 1..21: mol_type = other RNA
cccaggtctggaatgcaaagt

SEQ ID NO: 472 - RNA, 21 nt, synthetic construct
  source 1..21: mol_type = other RNA
tctggaatgcaaagtcaagga

SEQ ID NO: 473 - RNA, 21 nt, synthetic construct
  source 1..21: mol_type = other RNA
tagacaacacgtgtgtagtca

SEQ ID NO: 474 - RNA, 21 nt, synthetic construct
  source 1..21: mol_type = other RNA
ctggggctgagctttaaaatg

SEQ ID NO: 475 - RNA, 21 nt, synthetic construct
  source 1..21: mol_type = other RNA
tggggctgagctttaaaatgg

SEQ ID NO: 476 - RNA, 21 nt, synthetic construct
  source 1..21: mol_type = other RNA
ggggctgagctttaaaatggt

SEQ ID NO: 477 - RNA, 21 nt, synthetic construct
  source 1..21: mol_type = other RNA
gggctgagctttaaaatggtt

SEQ ID NO: 478 - RNA, 21 nt, synthetic construct
  source 1..21: mol_type = other RNA
ggctgagctttaaaatggttc

SEQ ID NO: 479 - RNA, 21 nt, synthetic construct
  source 1..21: mol_type = other RNA
agctttaaaatggttccgact

SEQ ID NO: 480 - RNA, 21 nt, synthetic construct
  source 1..21: mol_type = other RNA
gctttaaaatggttccgactt

SEQ ID NO: 481 - RNA, 21 nt, synthetic construct
  source 1..21: mol_type = other RNA
tttaaaatggttccgacttgt

SEQ ID NO: 482 - RNA, 21 nt, synthetic construct
  source 1..21: mol_type = other RNA
tgctggcctggcccttgagtg

SEQ ID NO: 483 - RNA, 21 nt, synthetic construct
  source 1..21: mol_type = other RNA
gctggcctggcccttgagtgg

SEQ ID NO: 484 - RNA, 21 nt, synthetic construct
  source 1..21: mol_type = other RNA
ccctcactgtggggcatttca

SEQ ID NO: 485 - RNA, 21 nt, synthetic construct
  source 1..21: mol_type = other RNA
cactgtggggcatttcaccat

SEQ ID NO: 486 - RNA, 21 nt, synthetic construct
  source 1..21: mol_type = other RNA
ctgtggggcatttcaccattc

SEQ ID NO: 487 - RNA, 21 nt, synthetic construct
  source 1..21: mol_type = other RNA
tggggcatttcaccattcaaa

SEQ ID NO: 488 - RNA, 21 nt, synthetic construct
  source 1..21: mol_type = other RNA
gcatttcaccattcaaacagg

SEQ ID NO: 489 - RNA, 21 nt, synthetic construct
  source 1..21: mol_type = other RNA
tttattgagctcttgttccgt

SEQ ID NO: 490 - RNA, 21 nt, synthetic construct
  source 1..21: mol_type = other RNA
ccctcatctccagctaactgt

SEQ ID NO: 491 - RNA, 21 nt, synthetic construct
  source 1..21: mol_type = other RNA
actgagccagaaacgcagatt

SEQ ID NO: 492 - RNA, 21 nt, synthetic construct
  source 1..21: mol_type = other RNA
tgagccagaaacgcagattgg

SEQ ID NO: 493 - RNA, 21 nt, synthetic construct
  source 1..21: mol_type = other RNA
gaagccaagcctcttcttact

SEQ ID NO: 494 - RNA, 21 nt, synthetic construct
  source 1..21: mol_type = other RNA
agccaagcctcttcttacttc

SEQ ID NO: 495 - RNA, 21 nt, synthetic construct
  source 1..21: mol_type = other RNA
cccaagcaagcagacatttat

SEQ ID NO: 496 - RNA, 21 nt, synthetic construct
  source 1..21: mol_type = other RNA
ccaagcaagcagacatttatc

SEQ ID NO: 497 - RNA, 21 nt, synthetic construct
  source 1..21: mol_type = other RNA
ttttgggtctgtcctctctgt

SEQ ID NO: 498 - RNA, 21 nt, synthetic construct
  source 1..21: mol_type = other RNA
tctgtcctctctgttgccttt

SEQ ID NO: 499 - RNA, 21 nt, synthetic construct
  source 1..21: mol_type = other RNA
ctgtcctctctgttgcctttt

SEQ ID NO: 500 - RNA, 21 nt, synthetic construct
  source 1..21: mol_type = other RNA
tgtcctctctgttgccttttt

SEQ ID NO: 501 - RNA, 21 nt, synthetic construct
  source 1..21: mol_type = other RNA
gtcctctctgttgccttttta

SEQ ID NO: 502 - RNA, 21 nt, synthetic construct
  source 1..21: mol_type = other RNA
cctctctgttgcctttttaca

SEQ ID NO: 503 - RNA, 21 nt, synthetic construct
  source 1..21: mol_type = other RNA
gttgcctttttacagccaact

SEQ ID NO: 504 - RNA, 21 nt, synthetic construct
  source 1..21: mol_type = other RNA
tgcctttttacagccaacttt

SEQ ID NO: 505 - RNA, 21 nt, synthetic construct
  source 1..21: mol_type = other RNA
cctttttacagccaacttttc

SEQ ID NO: 506 - RNA, 21 nt, synthetic construct
  source 1..21: mol_type = other RNA
ttttacagccaacttttctag

SEQ ID NO: 507 - RNA, 21 nt, synthetic construct
  source 1..21: mol_type = other RNA
gccaacttttctagacctgtt

SEQ ID NO: 508 - RNA, 21 nt, synthetic construct
  source 1..21: mol_type = other RNA
ccaacttttctagacctgttt

SEQ ID NO: 509 - RNA, 21 nt, synthetic construct
  source 1..21: mol_type = other RNA
caacttttctagacctgtttt

SEQ ID NO: 510 - RNA, 21 nt, synthetic construct
  source 1..21: mol_type = other RNA
acttttctagacctgttttgc

SEQ ID NO: 511 - RNA, 21 nt, synthetic construct
  source 1..21: mol_type = other RNA
ttttctagacctgttttgctt

SEQ ID NO: 512 - RNA, 21 nt, synthetic construct
  source 1..21: mol_type = other RNA
tttctagacctgttttgcttt

SEQ ID NO: 513 - RNA, 21 nt, synthetic construct
  source 1..21: mol_type = other RNA
tctagacctgttttgcttttg

SEQ ID NO: 514 - RNA, 21 nt, synthetic construct
  source 1..21: mol_type = other RNA
ctagacctgttttgcttttgt

SEQ ID NO: 515 - RNA, 21 nt, synthetic construct
  source 1..21: mol_type = other RNA
tagacctgttttgcttttgta

SEQ ID NO: 516 - RNA, 21 nt, synthetic construct
  source 1..21: mol_type = other RNA
agacctgttttgcttttgtaa

SEQ ID NO: 517 - RNA, 21 nt, synthetic construct
  source 1..21: mol_type = other RNA
gacctgttttgcttttgtaac

SEQ ID NO: 518 - RNA, 21 nt, synthetic construct
  source 1..21: mol_type = other RNA
acctgttttgcttttgtaact

SEQ ID NO: 519 - RNA, 21 nt, synthetic construct
  source 1..21: mol_type = other RNA
ctgttttgcttttgtaacttg

SEQ ID NO: 520 - RNA, 21 nt, synthetic construct
  source 1..21: mol_type = other RNA
gttttgcttttgtaacttgaa

SEQ ID NO: 521 - RNA, 21 nt, synthetic construct
  source 1..21: mol_type = other RNA
ttttgcttttgtaacttgaag

SEQ ID NO: 522 - RNA, 21 nt, synthetic construct
  source 1..21: mol_type = other RNA
tttgcttttgtaacttgaaga

SEQ ID NO: 523 - RNA, 21 nt, synthetic construct
  source 1..21: mol_type = other RNA
ttgcttttgtaacttgaagat

SEQ ID NO: 524 - RNA, 21 nt, synthetic construct
  source 1..21: mol_type = other RNA
cttttgtaacttgaagatatt

SEQ ID NO: 525 - RNA, 21 nt, synthetic construct
  source 1..21: mol_type = other RNA
ttttgtaacttgaagatattt

SEQ ID NO: 526 - RNA, 21 nt, synthetic construct
  source 1..21: mol_type = other RNA
tttgtaacttgaagatattta

SEQ ID NO: 527 - RNA, 21 nt, synthetic construct
  source 1..21: mol_type = other RNA
taacttgaagatatttattct

SEQ ID NO: 528 - RNA, 21 nt, synthetic construct
  source 1..21: mol_type = other RNA
aacttgaagatatttattctg

SEQ ID NO: 529 - RNA, 21 nt, synthetic construct
  source 1..21: mol_type = other RNA
aagatatttattctgggtttt

SEQ ID NO: 530 - RNA, 21 nt, synthetic construct
  source 1..21: mol_type = other RNA
agatatttattctgggttttg

SEQ ID NO: 531 - RNA, 21 nt, synthetic construct
  source 1..21: mol_type = other RNA
atatttattctgggttttgta

SEQ ID NO: 532 - RNA, 21 nt, synthetic construct
  source 1..21: mol_type = other RNA
tatttattctgggttttgtag

SEQ ID NO: 533 - RNA, 21 nt, synthetic construct
  source 1..21: mol_type = other RNA
ttctgggttttgtagcatttt

SEQ ID NO: 534 - RNA, 21 nt, synthetic construct
  source 1..21: mol_type = other RNA
ggttttgtagcatttttatta

SEQ ID NO: 535 - RNA, 21 nt, synthetic construct
  source 1..21: mol_type = other RNA
gttttgtagcatttttattaa

SEQ ID NO: 536 - RNA, 21 nt, synthetic construct
  source 1..21: mol_type = other RNA
ttttgtagcatttttattaat

SEQ ID NO: 537 - RNA, 21 nt, synthetic construct
  source 1..21: mol_type = other RNA
ttgtagcatttttattaatat

SEQ ID NO: 538 - RNA, 21 nt, synthetic construct
  source 1..21: mol_type = other RNA
atttttattaatatggtgact

SEQ ID NO: 539 - RNA, 21 nt, synthetic construct
  source 1..21: mol_type = other RNA
tttttattaatatggtgactt
